(19) United States
(12) Patent Application Publication
(10) Pub. No.: US 2010/0317002 A1
(43) Pub. Date: Dec. 16, 2010

(54) METHODS AND KITS FOR DIAGNOSING LUNG CANCER

(75) Inventors: Michal Daniely, Ganei Tikva (IL); Lea Madi, Rishon-LeZion (IL); Tal Kaplan, Gan-Yavne (IL); Boaz Pal, Tel-Aviv (IL); Yuval Harari, D.N. Emek Soreq (IL); Tanweer M. Zaidi, Houston, TX (US); Ricardo L. Fernandez, Houston, TX (US); Jinping Zhang, Houston, TX (US); Ruth Katz, Houston, TX (US)

Correspondence Address: MARTIN D. MOYNIHAN d/b/a PRTSI, INC., P.O. BOX 16446, ARLINGTON, VA, 22215, US

(73) Assignee: Bioview Ltd., Nes Ziona (IL)

(21) Appl. No.: 12/682,594

(22) PCT Filed: Oct. 6, 2008
(86) PCT No.: PCT/IL2008/001322

§ 371 Date: Aug. 31, 2010

Related U.S. Application Data
(60) Provisional application No. 60/960,735, filed on Oct. 11, 2007.

(51) Int. Cl. C12Q 1/68

(52) U.S. Cl. 435/6

(57) ABSTRACT

Provided is a method of identifying a genetically abnormal cell in a sputum sample, the method comprising: (a) staining a sputum sample using a morphological stain so as to identify a lower airway tract cell or lung cell in the sputum sample; and (b) staining the sputum sample using fluorescent in situ hybridization (FISH) so as to identify in the lower airway tract cell or lung cell a genetic abnormality in at least one of human chromosome 3p22.1 and 10q22-23, thereby identifying the genetically abnormal cell in the sputum sample. Also provided are methods and kits of diagnosing lung cancer by detecting a presence of genetically abnormal cells above a predetermined threshold in a sputum sample.

### FIELD AND BACKGROUND OF THE INVENTION

[0001] The present invention, in some embodiments thereof, relates to methods and kits of identifying genetically abnormal cells in a sputum sample and diagnosing lung cancer.

[0002] Lung cancer is the leading cause of cancer deaths worldwide with a still increasing incidence. Despite decades of research, prognosis is still poor and lung cancer patient have 85% chance of death within 5 years. Symptoms in the early stages of lung cancer are rarely seen and the majority of patients have locally advanced stage III or IV disease at diagnosis. For many patients, successful treatment remains elusive, because advanced tumors are often not operable, and may also be resistant to tolerable doses of radiotherapy and chemotherapy. In contrast, individuals with early stage disease can achieve cure through surgical resection. Because of this dichotomy in outcome associated with stage at diagnosis, there has been persistent interest in designing and testing methods for early detection of lung cancer.

[0003] The initiation and progression of lung cancer is associated with genetic abnormalities including point mutations, allelic loss and methylation of tumor suppressor genes. However, to date, none of these abnormalities has proven a promising biomarker for early detection of lung cancer, prediction of prognosis or determination of eligibility for clinical intervention. In addition, during the development of lung cancer, several cytological changes occur, which are associated with the transition from mild, moderate, and marked atypia, to carcinoma in situ and then to invasive carcinoma. These changes represent cellular aspects of toxic damage of respiratory tract epithelium which may result from smoking (nicotine) or exposure to radon gas.

[0004] Attempts to early diagnose lung cancer include sputum cytology, conventional chest x-ray, and helical computed tomography (CT) scanning. However, to date, the results of such screening tests have been controversial because of either low sensitivity and accuracy or the uncertain significance of their findings (Melamed M R., 2000). In addition, samples obtained by fine needle aspiration (FNA), tissue biopsy, bronchoscopically procured brush, wash, or lavage were subject to cytological or FISH analyses [Jiang F., et al., 2005; Fernandez R L., et al., 2006; Barkan G A., et al., 2005; U.S. Pat. Appl. No. 20060078885 to Katz R., et al.). Chromosomal aberrations in human chromosomes 3p22.1 and 10q22-23 were found to be associated with lung cancer (WO 00212563A2 to Katz R., et al.).

[0005] The so-called molecular field cancerization process likely results from multiple clonal abnormalities arising within respiratory epithelial cells exposed to carcinogenic substances from tobacco smoke and other pollutants and reflects genetic predisposition to reduced DNA repair capacity. The presence of concurrent cytologic atypia in sputum cells, especially moderate and severe dysplasia, is also believed to reflect this field effect and was shown to be substantially associated with an increased risk of developing lung cancer (Prindiville S A., et al., 2003).

[0006] The present inventors have previously developed the Duet™ system for scanning in Bright field and fluorescent modes (WO0049391A1). This system was successfully applied for multiple myeloma follow-up, hematological diseases, and bladder cancer recurrence (Hardan et al., 2004; Shimoni et al., 2002; Daniely et al., 2005; US 2004-0197839 to Daniely M. et al.).

[0007] Additional background art includes WO0212563A2 (to KATZ, R et al.), WO0626714 (to KATZ, R et al.), WO07087612A2 (to KATZ, R et al.), Nymark P., et al., 2006; Girard L., et al., 2000.

### SUMMARY OF THE INVENTION

[0008] According to an aspect of some embodiments of the present invention there is provided a method of identifying a genetically abnormal cell in a sputum sample, the method comprising: (a) staining a sputum sample using a morphological stain so as to identify a lower airway tract cell or lung cell in the sputum sample; and (b) staining the sputum sample using fluorescent in situ hybridization (FISH) so as to identify in the lower airway tract cell or lung cell a genetic abnormality in at least one of human chromosome 3p22.1 and 10q22-23, thereby identifying the genetically abnormal cell in the sputum sample.

[0009] According to an aspect of some embodiments of the present invention there is provided a method of diagnosing lung cancer in a subject comprising: (a) staining a sputum sample of the subject with a morphological stain so as to identify lower airway tract cells or lung cells in the sputum sample; (b) staining the sputum sample with FISH so as to identify a genetic abnormality in at least one of human chromosome 3p22.1 and 10q22-23 in the lower airway tract cells or lung cells identified in step (a), wherein a percentage or number above a predetermined threshold of the lower airway tract cells or lung cells having the genetic abnormality is indicative of the lung cancer, thereby diagnosing the lung cancer in the subject.

[0010] According to an aspect of some embodiments of the present invention there is provided a method of diagnosing lung cancer in a subject, comprising: (a) staining a sputum sample with a morphological stain so as to identify lower airway tract cells or lung cells in the sputum sample; (b) staining the sputum sample with FISH so as to identify a genetic abnormality in at least one of human chromosome 3p22.1 and 10q22-23 in cells of the sputum sample, wherein a percentage or number above a predetermined threshold of: (i) the lower airway tract cells or lung cells of the sputum sample identified in step (a) having the genetic abnormality; or (ii) the cells of the sputum sample having the genetic abnormality; is indicative of the lung cancer, thereby diagnosing the lung cancer in the subject.

[0011] According to an aspect of some embodiments of the present invention there is provided a kit for diagnosing lung cancer, the kit comprising a morphological stain and a FISH probe specific for human chromosome 3p22.1 and/or 10q22-23.

[0012] According to some embodiments of the invention, the cells of the sputum sample comprise lower airway tract cells, lung cells, squamous epithelial cells and/or blood cells.

[0013] According to some embodiments of the invention, the method further comprising: (c) imaging the lower airway tract cell or lung cell with at least two imaging modalities, thereby identifying the genetic abnormality in the cell.

[0014] According to some embodiments of the invention, the method further comprising: (c) imaging the lower airway tract cells or lung cells with at least two imaging modalities, thereby identifying genetic abnormalities in the lower airway tract cells or lung cells.

[0015] According to some embodiments of the invention, the imaging is effected simultaneously.

[0016] According to some embodiments of the invention, the imaging is effected using an automated image analysis device capable of at least dual imaging.

[0017] According to some embodiments of the invention, the kit further comprises instructions for use in diagnosing lung cancer.

[0018] According to some embodiments of the invention, the kit for diagnosing lung cancer in a sputum sample.

[0019] According to some embodiments of the invention, the sputum sample is induced by saline inhalation.

[0020] According to some embodiments of the invention, the instructions comprise a predetermined threshold of a percentage or number of lower airway tract cell or lung cell having a genetically abnormality in the human chromosome 3p22.1 and/or 10q22-23 which is indicative of positive diagnosis of lung cancer.

[0021] According to some embodiments of the invention, the sputum sample is obtained from a subject at risk of developing lung cancer.

[0022] According to some embodiments of the invention, the subject is at risk of developing lung cancer.

[0023] According to some embodiments of the invention, the lung cancer comprises non-small cell lung cancer.

[0024] According to some embodiments of the invention, the lung cancer comprises metastatic lung cancer.

[0025] According to some embodiments of the invention, the morphological stain is selected from the group consisting of May-Grünwald-Giemsa, Giemsa, Papanicolaou, Diff-Quick, and Hematoxylin-Eosin.

[0026] According to some embodiments of the invention, the FISH is effected using a FISH probe specific to human chromosome 3p22.1 and a FISH probe specific to human chromosome 10q22-23.

[0027] According to some embodiments of the invention, the FISH is effected using at least three FISH probes.

[0028] According to some embodiments of the invention, the FISH is effected using at least four FISH probes.

[0029] According to some embodiments of the invention, the FISH is effected using a FISH probe specific to human chromosome 3p22.1, a FISH probe specific to human chromosome 10q22-23 and a FISH probe specific to human chromosome 10.

[0030] According to some embodiments of the invention, the FISH is effected using a FISH probe specific to human chromosome 3p22.1, a FISH probe specific to human chromosome 10q22-23 and a FISH probe specific to human chromosome 3.

[0031] According to some embodiments of the invention, the FISH is effected using a FISH probe selected from a group of probes specific to human chromosome 3p22.1, human chromosome 10q22-23, human chromosome 3 and human chromosome 10.

[0032] Unless otherwise defined, all technical and scientific terms used herein have the same meaning as commonly understood by one of ordinary skill in the art to which this invention belongs. Although methods and materials similar or equivalent to those described herein can be used in the practice or testing of the present invention, suitable methods and materials are described below. In case of conflict, the patent specification, including definitions, will control. In addition, the materials, methods, and examples are illustrative only and not intended to be limiting.

### BRIEF DESCRIPTION OF THE DRAWINGS

[0033] Some embodiments of the invention are herein described, by way of example only, with reference to the accompanying drawings. With specific reference now to the drawings in detail, it is stressed that the particulars shown are by way of example and for purposes of illustrative discussion of embodiments of the invention. In this regard, the description taken with the drawings makes apparent to those skilled in the art how embodiments of the invention may be practiced.

[0034] In the drawings:

[0035] FIGS. 1A-F are microscope images depicting cells of a sputum sample analyzed by FISH (FIGS. 1A, B, C and D) or Papanicolaou's stain (FIGS. 1E and F). A non-induced sputum sample was obtained from a 52-year-old healthy control individual, who never smoked and was subject to morphological staining (using Papanicolaou's stain) and FISH staining (using probes specific to the 3p22.1, 10q22-23, centromeric region of chromosome 3 and 10). FIGS. 1A-B—FISH analysis of squamous epithelial cells depicting diploid (two) signals for 3p22.1 (green) and centromeric 3 (orange); FIGS. 1C-D—FISH analysis of squamous epithelial cells depicting diploid signals for 10q22-23 (SFTPA1 gene; green) and centromeric 10 (red); FIGS. 1E-F—Morphological staining of squamous epithelial cells in sputum depicting normal morphology with unremarkable nuclear features and thin homogenous cytoplasm (Papanicolaou's stain; original magnification 400×). Total FISH abnormalities for 3p22.1, centromeric 3, 10q22-23, and centromeric 10 probes in all analyzed cells of the sputum sample (at least 100 epithelial cells) were 6.7%, which results along with cytology parameters analyzed on parallel slides in a cancer risk probability score of 0.064.

[0036] FIGS. 2A-D are microscope images depicting cells of a sputum specimen analyzed by FISH (FIGS. 2A and B) or Papanicolaou's stain (FIGS. 2C and D). A non-induced sputum sample was obtained from a high-risk 61-year-old male individual having a smoking history of 100 pack-year and a CT scan negative for lung cancer. The cells of the sputum sample were stained with Papanicolaou's stain or FISH using probes specific to 3p22.1, 10q22-23, centromere 3 and centromere 10. FIG. 2A—FISH analysis demonstrates a deletion of the 3p22.1 chromosomal locus (only one green signal; see green arrow pointing at the signal) relative to two copies of the centromeric region of chromosome 3 (two red signals; see red arrows pointing at the signals). FIG. 2B—FISH analysis demonstrates loss of the 10q22-23 locus (only one green signal; see green arrow pointing at the signal) relative to two copies of the centromeric region of chromosome 10 (see two red signals). Magnification of images in FIGS. 2A and B are ×630 (oil immersion objective). The total FISH abnormalities for 3p22.1, centromeric regions 3 and 10, and 10q22-23 were 15.5%. FIGS. 2C-D—Cytologic examination using Papanicolaou's stain shows cells of moderate to severe dysplasia with hyperchromatic irregular nuclei and keratinized thickened orange cytoplasm (FIG. 2C) and atypical squamous metaplasia (FIG. 2D). Magnification of images in FIGS. 2C-D are ×400. The calculated cancer risk probability score is 0.844.

[0037] FIGS. 3A-E are microscope images depicting cells of a sputum specimen analyzed by FISH (FIGS. 3A and B) or Papanicolaou's stain (FIGS. 3C, D and E). A non-induced sputum sample was obtained from a 67-year-old female, non-smoker, with a family history of lung cancer, who had stage III adenocarcinoma (peripheral lesion). The cells of the sputum sample were stained with Papanicolaou's stain or FISH using probes specific to 3p22.1, 10q22-23, centromere 3 and centromere 10. FIGS. 3A-B—Actual view (FIG. 3A) and “synthetic” view (i.e., an image created by the image analysis system describing the algorithm analysis of the image) (FIG. 3B) of FISH analysis demonstrating deletions of 3p22.1 (as indicated by the loss of one green signal) relative to two copies of the centromeric region of chromosome 3 (2 red signals). Based on the FISH analysis the total deletion 10q was 5.69%, centromeric 10 monosomy was 2.43%, and deletion 3p22.1 was 6.79%. Total number of FISH abnormalities involving chromosomes 3 and 10 were 15.89%. FIGS. 3C, D and E—Cytologic examination (Papanicolaou's stain) demonstrating extensive moderately and severely dysplastic cells (arrows). Magnification of the images shown in FIGS. 3C-E are ×400. The calculated cancer risk probability score is =0.817. This patient died with metastatic disease 24 months later.

[0038] FIGS. 4A-D are microscope images depicting cells of a sputum specimen analyzed by FISH (FIGS. 4C and D) or Papanicolaou stain (FIGS. 4A and B). A non-induced sputum sample was obtained from a 63-year-old man with a history of 50 pack-years of smoking. The cells of the sputum sample were stained with Papanicolaou or FISH using probes specific to 3p22.1, 10q22-23, centromere 3 and centromere 10. FIGS. 4A-B—Morphological staining demonstrating cells of moderate and severe dysplasia (arrows) (Papanicolaou's stain; original magnification ×400). FIG. 4C—FISH analysis demonstrating deletion of 3p22.1 (one green signal) relative to two copies of the centromeric probe of chromosome 3 (two red signals); FIG. 3D-FISH analysis demonstrating deletions of 10q22-23 (one green signal) relative to two copies of the centromeric probe of chromosome 10 (two red signals). The total 3p22.1 deletions were 5.63% and the total 10q22-23 deletions were 3.78%. Total FISH abnormalities of chromosomes 3 and 10 were 9.4%. The calculated cancer risk probability score is=0.830.

[0039] FIG. 5 is a graph depicting receiver operator curve (ROC) showing sensitivity and specificity of sputum test when cytology and FISH variables are combined. The ROC curve is based on FISH variables and cytology diagnosis. Y axis=sensitivity; X axis=specificity. The area under curve=0.822.

[0040] FIG. 6 is a graph depicting receiver operator curve (ROC) based on cytology, FISH or combining FISH and cytology variables (determined independently on parallel slides). Y axis=sensitivity; X axis=specificity. Shown are the sensitivity and specificity of sputum test when cytology and FISH variable are combined (red curve), FISH variables only (green curve) and cytology variable only (blue curve). The area under the curve equals to 0.822 when combining FISH variables with cytology (red), 0.682 based on the FISH variable alone (green) and 0.742 based on the cytological analysis alone.

[0041] FIGS. 7A-J depict various cells stained with Giemsa which may be present in a sputum sample. FIGS. 7A-I—depict cells which are relevant for the target scan since they are derived from the lower airway tract and the lungs, and FIG. 7J depicts a cell which is not-relevant for the target scan since it is derived from the upper airway tract. FIGS. 7A, 7B and 7C—metaplastic cells; FIGS. 7D, 7E and 7F—atypical cells; FIGS. 7G and 7H—lung macrophages; FIG. 7I—A respiratory epithelial cell; FIG. 7J—A squamous epithelial cell (derived from the upper airway tract).

[0042] FIGS. 8A-F are images of cells which were subject to the combined analysis (target scan) using a morphological Giemsa staining (FIGS. 8A, 8C and 8E) followed by FISH analysis (FIGS. 8B, 8D and 8F) with the 3p22.1 (green), 10q22-23 (red) and CEP10 (centromere of chromosome 10; aqua) probes. FIGS. 8A-B—bright field (FIG. 8A) and dark field (FIG. 8B) images of the same single cell (a respiratory epithelial cell) exhibiting two green signals (one is underneath the aqua signal), two aqua signals and one red signal, demonstrating a deletion of 10q22-23. FIGS. 8C-D—bright field (FIG. 8C) and dark field (FIG. 8D) images of the same single cell (a respiratory epithelial cell) exhibiting four green signals, three aqua signals and three red signals, demonstrating polysomy. FIGS. 8E-F—bright field (FIG. 8E) and dark field (FIG. 8F) images of the same single cell (a metaplastic cell) exhibiting three green signals, two aqua signals and two red signals, demonstrating amplification of 3p22.1. Magnifications used in FIGS. 8A, 8C and 8E—×20 objective; Magnifications used in FIGS. 8B, 8D and 8F—×60 objective.

[0043] FIG. 9 is chart plot describing results from 71 sputum samples analyzed by 3-color target FISH. The x axis represents the number of targets (cells-of-interest) analyzed per sputum sample; the y axis represents the “scoring index”. This index reflects the percentage of FISH aberrant cells out of the “target cells” identified in the sample and the cutoff for a positive result depends on the total number of “target cells” that were scored. The cutoff for a positive diagnosis is 7.5. It can be seen that all cancer patients, except one, are located above the threshold while the majority of healthy population (either smokers and non-smokers) are located below the threshold.

[0044] FIGS. 10A-C depict respiratory cells stained with Papanicolaou. FIG. 10A—ciliated cell; FIG. 10B—nonciliated bronchiolar (Clara) cell; FIG. 10C—goblet cell.

[0045] FIGS. 10D-E depict cells found in the epithelium of the alveoli stained with Papanicolaou. FIG. 10D—alveolar macrophage; FIG. 10E—alveolar type II cell.

[0046] FIGS. 11A-F depict cells stained with Papanicolaou which may be present in sputum sample. FIG. 11A—metaplastic cell; FIG. 11B—atypical cancer cell; FIG. 11C—atypical respiratory cell; FIG. 11D—intermediate squamous cell (a normal squamous cell which is not located on the surface of the tissue (superficial) but below the surface); FIG. 11E—squamous normal cell; FIG. 11F—superficial squamous cell.

[0047] FIG. 12 is a schematic illustration depicting the respiratory system including the lungs with alveolie, bronchioles, bronchus, trachea, larynx and pharynx.

[0048] FIGS. 13A-B depict Type I and II alvelolie cells.

[0049] FIG. 14 depicts cells of a blood smear showing (a) erythrocytes (red blood cells), (b) neutrophil; (c) eosinophil; and (d) lymphocyte.

[0050] FIG. 15 depicts atypically squamous cells characterized by deeply keratin, hyperchromatic nuclei, suspicious of squamous cell carcinoma.

### DESCRIPTION OF SPECIFIC EMBODIMENTS OF THE INVENTION

[0051] The present invention, in some embodiments thereof, relates to methods and kits of identifying genetically abnormal cells in a sputum sample and diagnosing lung cancer.

[0052] Before explaining at least one embodiment of the invention in detail, it is to be understood that the invention is not necessarily limited in its application to the details set forth in the following description or exemplified by the Examples. The invention is capable of other embodiments or of being practiced or carried out in various ways.

[0053] While reducing the present invention to practice, the present inventors have uncovered a novel, non-invasive method of identifying genetically abnormal cells in sputum samples, which can be efficiently employed in high sensitive detection of lung cancer. Thus, as shown in FIGS. 8A-B, 8C-D, 8E-F and described in Examples 3-4 of the Examples section which follows, the present inventors have stained cells of a sputum sample by two stains: a morphological stain which enables visualization of the morphological characteristics of a cell and classification thereof (e.g., type, level of differentiation, presence of abnormal morphological changes such as those found in atypic, metaplastic or dysplastic cells), and a subsequent FISH stain which enables determination of chromosomal abnormalities in human chromosome 3p22.1 and/or 10q22-23 on the same single cell previously identified by the morphological stain. Such an analysis enables determination of presence or absence of genetic abnormalities in specific cells of a sputum sample which are identified by the morphological stain such as lower airway tract cells, lung cells or cytologically abnormal cells.

[0054] Thus, according to one aspect of the invention there is provided a method of identifying a genetically abnormal cell in a sputum sample. The method is effected by (a) staining a sputum sample using a morphological stain so as to identify a lower airway tract cell or lung cell in the sputum sample; and (b) staining the sputum sample using fluorescent in situ hybridization (FISH) so as to identify in the lower airway tract cell or lung cell a genetic abnormality in at least one of human chromosome 3p22.1 and 10q22-23, thereby identifying the genetically abnormal cell in the sputum sample.

[0055] As used herein the phrase “sputum sample” refers to a biological sample expectorated from the respiratory tract excluding that from the nasal passages, and includes mucus or phlegm mixed with saliva which can then be spat from the mouth. The sputum sample typically includes cells of the lower respiratory tract such as of the lungs, bronchi, alveoli, as well as cells of the upper respiratory tract such as of the trachea, larynx, pharynx and mouth.

[0056] The sputum sample can be collected from the subject by coughing and/or spitting into a collecting container (a non-induced sputum sample). Additionally or alternatively, the sputum sample can be collected from the subject after the subject inhales a substance (e.g., saline) which induces a more deep cough and results in the accumulation of more cells of the lower airway tract and lungs in the collecting container (an induced sputum sample).

[0057] Prior to staining, the sputum sample can be treated so as to isolate cells contained therein. For example, the sputum sample can be treated with dithiothreitol (DTT) and dithioerythritol which break the disulphide bonds in the mucin molecules, and release the cells from the mucus. To remove mucus and other debris from the cells, the sputum sample is further subjected to filtration e.g., using a nylon mesh. Following filtration, the isolated cells can be placed on microscopic slides e.g., using a cyto-centrifuge or as cell smears.

[0058] The genetic abnormality can be for example chromosomal aneuploidy (i.e., when the number of chromosomes is not diploid) such as a complete or partial multisomy [i.e., excess of chromosomes, e.g., trisomy (three copies of a certain chromosome) or polysomy (at least three copies of more than one chromosome)] and monosomy (presence of only one copy of a certain chromosome), imbalanced rearrangement such as imbalanced translocation or imbalanced inversion, inversion, deletion, macrodeletion, microdeletion and/or complete or partial chromosomal duplication.

[0059] As used herein the phrase “morphological stain” refers to a dye or a combination of dyes which enables visualization of a cell's morphology. Non-limiting examples of morphological stains which can be used by the method of the invention include May-Grünwald-Giemsa stain, Giemsa stain, Diff-Quick stain, Papanicolaou stain, Hematoxylin-Eosin stain, and DAPI stain.

[0060] According to some embodiments of the invention, the morphological stain used by the method of the invention is May-Grünwald-Giemsa stain, Giemsa stain, Diff-Quick stain, Papanicolaou stain or Hematoxylin-Eosin stain. Morphological stains are readily available from Sigma (Sigma, St Louis, Mo., USA), and Merck (KGaA, Darmstadt, Germany).

[0061] Following staining with the morphological stain, the cells are viewed via a microscope or an imaging device. As mentioned, once the cell morphology is visualized, the cell can be identified based on its morphological characteristics defining the cell type, source (e.g., the tissue of origin), developmental stage and/or malignant/normal state (e.g., pre-malignant, malignant or normal). Identification of cells of a sputum sample can be done by anyone skilled in the art of histology or pathology based on the known morphological features of each cell type as described in any histological text book which includes description of the respiratory tract and lungs [see e.g., Hypertext Transfer Protocol://World Wide Web (dot) lab (dot) anhb (dot) uwa (dot) edu (dot) au/mb140/CorePages/Respiratory/Respir (dot) htm#LARYNX; and Hypertext Transfer Protocol://World Wide Web (dot) med-ed (dot) virginia (dot) edu/public/CourseSitesDocs/CellandTissueStructure/handouts/unrestricted/original/MM Hndt_Respiratory (dot) html] and as briefly exemplified herein and in Example 2 of the Examples section which follows.

[0062] A sputum sample may include cells of the a lower airway tract (lower respiratory tract) including respiratory epithelial cells such as goblet cells, ciliated cells and non-ciliated cells (also called Clara cells, present also in bronchium), lung cells [epithelial cells of the alveoli (alveolar type I and type II cells) and alveolar macrophages], cells of the upper respiratory tract, trachea, pharynx, larynx and mouth, such as squamous epithelial cells, and blood cells [red blood cells (RBC) and white blood cells [such as lymphocytes, polymorphonuclear (PMN) cells, and other white blood cells (WBC)]. It should be noted that a sputum sample may also include abnormal cells, such as cells derived from the lower airway tract and lungs which underwent morphological changes (including reversible and un-reversible change). Non-limiting examples of morphologically abnormal cells of the lower airway tract or lung include squamous metaplasia cells, squamous atypia and squamous dysplasia cells. Example 2 of the Examples section which follows and FIGS. 1E-F, 2C-D, 3C-E, 4A-B, 7A-J, 8A, C and E, 10A-E, 11A-F, 13A-B, 14 and 15 provide description and images of the morphological characteristics of the cells which may be present in the sputum sample.

[0063] The phrase “lower airway tract cell or lung cell” as used herein encompasses morphologically normal and morphologically abnormal cells of the lower airway tract and lung. Examples of morphologically normal lower airway tract cells include respiratory epithelial cells such as goblet cells, ciliated cells and non-ciliated cells; examples of morphologically normal lung cells include epithelial cells of the alveoli such as alveolar type I and type II cells and alveolar macrophages; and examples of morphologically abnormal cells of the lower airway tract or lung include squamous metaplasia cells, squamous atypia and squamous dysplasia cells.

[0064] According to the method of this aspect of the invention, the morphological stain enables the identification of a lower airway tract cell (e.g., a goblet cell, a ciliated cell, a non-ciliated cell) and a lung cell (e.g., an alveolar type I cell, an alveolar type II cell and an alveolar macrophage) as well as of lower airway tract cells and lung cells having morphological abnormalities (e.g., squamous metaplasia cells, squamous atypia and squamous dysplasia cells).

[0065] According to some embodiments of the invention, cells of a sputum sample which are excluded from the subsequent FISH analysis (i.e., not selected for the subsequent FISH scan based on the morphological staining) are those derived from the upper airway tract, upper part of the trachea, pharynx, larynx and mouth such as squamous epithelial cells (see Example 2 of the Examples section which follows).

[0066] A squamous epithelial cell is a large, very flat cell, with irregular shape (not round, not oval) and characterized by a small nucleus/cytoplasm ratio. FIGS. 1E, 1F and 7J depict exemplary images of squamous epithelial cells.

[0067] According to some embodiments of the invention, cells which are excluded from the subsequent FISH analysis (based on the morphological staining) are blood cells (See Example 2 of the Examples section which follows and FIG. 14).

[0068] Once identified, images of the stained lower airway tract cell or lung cell can be stored and the position (i.e., coordinate location) of the cell-of-interest on the slide is saved for a later reference when evaluating FISH results (signals) on the same single cell.

[0069] According to some embodiments of the present invention, prior to FISH staining, the morphologically stained cells are subjected to destaining (removal of the previous morphological stain from the cells) to prevent imaging interference of residual morphological stain with the subsequent FISH stain. Methods of destaining are well known in the art and are provided in the Examples section which follows.

[0070] As used herein the phrase “fluorescent in situ hybridization (FISH)” refers to a fluorescent method of detecting a presence or absence, order and/or a copy number of a nucleic acid sequence in a chromosomal DNA sample.

[0071] FISH is typically performed using at least one FISH probe. As used herein the phrase “FISH probe” refers to a labeled isolated polynucleotide having a nucleic acid sequence hybridizable to a target chromosomal DNA sequence. The target chromosomal DNA sequence can be a specific locus or gene on the chromosome, several loci or genes, a centromeric region of a chromosome, a repetitive sequence of a chromosome, satellite sequences, or the complete chromosome.

[0072] The FISH probe can be in a form of a plasmid, a bacteriophage, a yeast artificial chromosome (YAC) or a bacterial artificial chromosome (BAC). The length of the FISH probe can be selected such that it produces a detectable signal upon binding with the target chromosomal DNA, yet with high specificity to the sequence of interest (e.g., the specific gene or locus of interest). For example, the FISH probe can be of at least 1500 nucleotides and yet results in a specific FISH signal (see Knoll, J. H. M., Methods in Molecular Biology, 2007, 374: 55-66). A FISH probe can be of 1000-2000 bases (see e.g., WO00212563), or longer, such as at least 2 kilobases.

[0073] The FISH probe can be either directly labeled by conjugating a fluorophore via a linker or a chemical bond to at least one nucleotide of the probe, or indirectly labeled, by conjugating a non-labeled moiety which is bindable to a fluorescently-labeled counterpart. Non-limiting examples of suitable binding counterparts include biotin and streptavidin; biotin and avidin; an enzyme (e.g., Horse Radish Peroxidase) and a substrate (e.g., o-phenylenediamine); digoxigenin and an anti-digoxigenin antibody.

[0074] As used herein the term “fluorophore” refers to an entity which can be excited by light to emit fluorescence. Such a fluorphore can be an artificial or a naturally occurring molecule [e.g., fluorescein, eosin, an acridine dye, Texas Red, rhodamine, TAMRA, AMCA, TRITC, FITC, Cy2, Cy3, Cy5, Cy7, 6-FAM, HEX, 6-JOE, Oregon green 488, Oregon green 500, Oregon green 514, pacific blue, REG, ROX, TET, Alexa 350, Alexa 430, BODIPY 630/650, cascade blue, AlexaFluor P568, AlexaFluor P546, AlexaFluor P660, Spectrum ORANGE, Spectrum AQUA, Spectrum GREEN, Spectrum RED and the like), or a quantum dot. Quantum dots are coated nanocrystals fabricated from semiconductor materials in which the emission spectrum is controlled by the nanocrystal size. Quantum dots have a wide absorption spectrum, allowing simultaneous emission of fluorescence of various colors with a single excitation source. Quantum dots can be modified with large number of small molecules and linker groups such as conjugation of amino (PEG) or carboxyl quantum dots to streptavidin (Quantum Dot Corporation, Hayward, Calif., USA).

[0075] Suitable FISH probes can be identified by searching available databases such as the National Center for Biotechnology Information (NCBI) registry (Hypertext Transfer Protocol://World Wide Web (dot) ncbi (dot) nlm (dot) nih (dot) gov/projects/genome/clone/] and are available in either a labeled or an unlabeled form from suppliers such as Vysis (Downers Grove, Ill.), Abbot (Des Plaines, Ill.), and Invitrogen Corp., Carlsbad, Calif.

[0076] Non-limiting examples of suitable FISH probes which can detect a chromosomal aberration in the human 3p22.1 locus include the BAC clone for 3p22.1 (RP11-391M1; Invitrogen Corp., Carlsbad, Calif.) as set forth by GenBank Accession No. AC104186 (SEQ ID NO:1); a polynucleotide which comprises the RPL14 gene (GenBank Accession No. for transcript—NM_{—}003973; Genomic sequence—nucleotides 40473805-40478863 of GenBank accession No. NC_{—}000003.10 (SEQ ID NO:2), a polynucleotide which comprises the ENTPD3 gene (CD39L3; nucleotides 40403694-40445114 of GenBank Accession No. NC_{—}000003.10 (SEQ ID NO:3); GenBank Accession No. NM_{—}001248.1 for transcript); a polynucleotide which comprises the GC20 gene [nucleotides 40326177-40328919 of GenBank Accession No. NC_{—}000003.10 (SEQ ID NO:4)] and PMGM (CADM2; nucleotides 85858322-86200641 of GenBank Accession No. NC_{—}000003.10 (SEQ ID NO:5)]. Additional suitable FISH probes which can identify a genetic abnormality in the human chromosome 3p22.1 are provided in Table 24 in Example 5 of the Examples section which follows.

[0077] Non-limiting examples of suitable FISH probes which can detect a chromosomal aberration in the human 10q22.2-q23.1 locus include the BAC clone for 10q22.2-q23.1 (clone RP11-506M13; Invitrogen Corp., Carlsbad, Calif.) as set forth in GenBank Accession No. AC068139 (SEQ ID NO:6); a polynucleotide which comprises the SP-A which comprise SFTPA1 [nucleotides 81040722-81045206 on GenBank Accession No. NC_{—}000010.9 (SEQ ID NO:7)] and SFTPA2 [locus tag RP11-589B3.4, nucleotides 80990169-80985614 on GenBank Accession No. NC_{—}000010.9 (SEQ ID NO:8)]; a polynucleotide which comprises the PTEN/MMAC1 [phosphatase and tensin homolog, GenBank Accession AF067844; nucleotides 89613175-89718512 on GenBank Accession No. NC_{—}000010.9 (SEQ ID NO:9)]. Additional suitable FISH probes which can identify a genetic abnormality in the human chromosome 10q22.2-q23.1 are provided in Table 25 in Example 5 of the Examples section which follows.

[0078] Further description of suitable FISH probes is provided in WO00212563 A2 to Katz Ruth et al., which is fully incorporated herein by reference.

[0079] It will be appreciated that detection of specific deletions may require a combination of a locus-specific FISH probe with a chromosomal-specific FISH probe, derived from chromosome 3 or 10, which indicates the copy number of the respective chromosome (i.e., human chromosome 3 or 10). Such a FISH probe can be derived from the centromere of chromosome 3 or 10 (i.e., centromeric-specific FISH probe) or from any known sequence of the chromosome. Non-limiting examples of chromosomal-specific FISH probe which can be used along with the 3p22.1 or the 10q22.2-q23.1 locus-specific FISH probes include: Chromosome 3 alpha satellite probes or centromeric-specific FISH probe (from various manufacturers) and BCL6 (for Chromosome 3); and Chromosome 10 alpha satellite probes or centromeric-specific FISH probe (from various manufacturers) and PTEN (for chromosome 10).

[0080] For example, identification of chromosomal aberrations on human chromosome 3p22.1 can be performed using a locus-specific FISH probe (a FISH probe specific to human chromosome 3p22.1) and a centromeric-specific FISH probe (e.g., CEP 3). In addition, identification of chromosomal aberrations on human chromosome 10q22-23 can be performed using a locus-specific FISH probe (a FISH probe specific to human chromosome 10q22-23) and a centromeric-specific FISH probe (e.g., CEP 10). Additionally or alternatively, identification of chromosomal aberrations on human chromosome 10q22-23 and 3p22.1 can be performed using two locus-specific FISH probes (a FISH probe specific to human chromosome 10q22-23, and a FISH probe specific to human chromosome 3p22.1).

[0081] According to some embodiments of the invention, FISH is effected using at least three FISH probes. For example, FISH can be performed using a FISH probe specific to human chromosome 3p22.1, a FISH probe specific to human chromosome 10q22-23 and a FISH probe specific to a centromeric region of human chromosome 3 (e.g., CEP 3). Additionally or alternatively, FISH can be performed using a FISH probe specific to human chromosome 3p22.1, a FISH probe specific to human chromosome 10q22-23 and a FISH probe specific to a centromeric region of human chromosome 10 (e.g., CEP 10).

[0082] According to some embodiments of the invention, FISH is effected using at least four FISH probes. For example, FISH can be performed using a FISH probe specific to human chromosome 3p22.1, a FISH probe specific to human chromosome 10q22-23, a FISH probe specific to a centromeric region of human chromosome 3 (e.g., CEP 3) and a FISH probe specific to a centromeric region of human chromosome 10 (e.g., CEP 10).

[0083] Methods of employing FISH analysis on interphase chromosomes are known in the art. Following is a non-limiting example of FISH hybridization and after-hybridization wash conditions which can be used by the method of the invention. Directly-labeled probes [e.g., the RP11-506MI3 FISH probe specific to human chromosomal locus 10q22.2-q23.1 labeled with Spectrum Green dUTP or with Spectrum Red dUTP (Vysis), the RP11-391M1 FISH probe specific to the 3p22.1 locus labeled with Spectrum Green dUTP, CEP 3 FISH probe specific to centromere chromosome 3 labeled with Spectrum Orange; and CEP 10 FISH probe specific to centromere chromosome 10 labeled with Spectrum Orange or Spectrum aqua] are mixed with hybridization buffer (e.g., LSI hybridization buffer, Vysis) and a carrier DNA (e.g., human Cot-1 DNA, available from Life Technologies, Rockville, Md.). The probe solution is applied on microscopic slides containing the sputum samples and the slides are covered using a coverslip. The probe and the cells on the slides are co-denatured, e.g., for 3 minutes at 70° C. and are further incubated for hybridization e.g., for overnight incubation at 37° C. using an hybridization apparatus (e.g., HYBrite, Abbott Cat. No. 2J11-04). Following hybridization, the slides are washed to remove excess of unbound labeled probe and/or non-specific binding [e.g., 2 minutes at 72° C. in a solution of 0.3% NP-40 (Abbott) in 60 mM NaCl and 6 mM NaCltrate (0.4×SSC)], followed by a wash of 1 minute in a solution of 0.1% NP-40 in 2×SSC at room temperature], following which the slides are counterstained. Counterstaining is performed using, for example, 4′,6-diamidino-2-phenylindole (DAPI) and evaluated under a fluorescence microscope equipped with the appropriate filter combinations. If the hybridization signals were deemed satisfactory, the slides are sent for automated FISH scanning.

[0084] Following FISH, cells-of-interest are imaged using a fluorescent microscopy mode with appropriate filters. Thereafter, images of cells of interest stained in a morphological stain and in FISH stain can be viewed. According to some embodiments of the invention, imaging of the cells is performed using at least two imaging modalities, e.g., a bright field modality for viewing the morphological stain and a dark field modality for viewing the FISH stain. Imaging can be effected simultaneously by viewing at the same time the stored images of the same single cell stained with the morphological stain (one image) and the FISH stain (another image). Alternatively, imaging can be effected sequentially by viewing the cells following the morphological stain, selecting cells-of-interest for the subsequent scan and viewing the selected cells-of-interest after the FISH stain.

[0085] According to some embodiments of the invention, imaging is effected using a device capable of dual imaging, i.e., a bright field and a dark field imaging modes. Such a device can be an automated image analysis device capable of at least dual imaging. A suitable imaging apparatus which can be used for executing the method of the invention is the Bio View Duet™ (Bio View, Rehovot, Israel).

[0086] The above teachings can be efficiently harnessed to the clinical evaluation of cytological samples for the diagnosis of lung cancer. The method is based on the identification in a sputum sample of genetically abnormal lower airway tract/lung cells (having chromosomal aberrations in the human chromosome 3p22.1 and/or 10q22-23 loci) above a predetermined threshold (in absolute number or percentage). Thus, as shown in the Examples section which follows, the novel method of the invention resulted in unprecedented sensitivity and specificity values of lung cancer diagnosis such as a sensitivity of 93.1% and a specificity of 80.95% (Table 23, Example 4). This is in sharp contrast to the sensitivity and specificity values which are obtained when using other non-invasive methods of diagnosing lung cancer, such as sputum cytology alone which results in 31.4% sensitivity and 87% specificity when considering moderate and severe dysplasia as predictors of the presence of lung cancer (Example 1), or in 11.4% sensitivity and 93.5% specificity when considering severe dysplasia as a predictor for lung cancer (Example 1); or FISH scan alone which results in 81.8% sensitivity and 80% specificity (Example 3).

[0087] Thus, according to an aspect of some embodiments of the invention, there is provided a method of diagnosing of lung cancer in a subject. The method is effected by (a) staining a sputum sample of the subject with a morphological stain so as to identify lower airway tract cells or lung cells in the sputum sample; and (b) staining the sputum sample with FISH so as to identify a genetic abnormality in at least one of human chromosome 3p22.1 and 10q22-23 in the lower airway tract cells or lung cells identified in step (a), wherein a percentage or number above a predetermined threshold of the lower airway tract cells or lung cells having the genetic abnormality is indicative of the lung cancer, thereby diagnosing the lung cancer in the subject.

[0088] The term “diagnosing” as used herein refers to determining presence or absence of a disease, classifying a disease severity or symptom, monitoring disease progression, forecasting an outcome of a disease and/or prospects of recovery.

[0089] The phrase “lung cancer” as used herein encompasses small cell lung cancer, non-small cell lung cancer (NSCLC) and metastatic lung cancer (i.e., a cancer comprising cancerous cells originating in a distant organ and penetrating into the lung tissue). Non-limiting examples of cancerous cells which can form cancer metastasis in the lung tissue include breast cancer, colon cancer, prostate cancer, sarcoma, bladder cancer, neuroblastoma and Wilm's tumor).

[0090] As used herein the term “subject” refers to a human being who may be of any age or gender.

[0091] According to some embodiments of the invention, the subject is at a risk of developing lung cancer due to genetic, environmental and/or occupational hazard factors. Non-limiting examples of known risk factors include tobacco or Marijuana smoking; exposure to asbestos, radon, radioactive ores such as uranium, chemicals such as arsenic, vinyl chloride, nickel chromates, coal products, mustard gas and chloromethyl ethers, industrial grade Talcum powder (which may contain asbestos); recurring inflammation (e.g., Tuberculosis, pneumonia); personal and family history; vitamin A deficiency or excess; and air pollution.

[0092] According to some embodiments of the invention, morphology-stained cells are scanned under Bright field illumination (morphology scan) to identify cells-of-interest [i.e., cell exhibiting morphological characteristics typical to pre-defined cells such as lower airway tract cells or a lung cells (see e.g., FIGS. 7A-I; and Example 2)] and to exclude squamous epithelial cells (see e.g., FIGS. 1E, 1F and 7J) and blood cells (see FIG. 14) from the analysis. During the morphology scan, images are produced for all cells and their coordinates are saved. Cells-of-interest (lower airway tract and lung cells) are classified automatically or manually into a sub-group (target cells), and are further subjected to evaluation of FISH results, thus identifying the genetic abnormalities in human chromosome 3p22.1 and/or 10q22-23 on the same target cells identified by the morphological scan.

[0093] The predetermined threshold can be determined experimentally by comparing two groups of individuals, one group includes subjects diagnosed with lung cancer and another group includes healthy controls (free of the disease), essentially as described in Examples 3 and 4 of the examples section which follows.

[0094] According to some embodiments of the invention, the threshold is at least 1%, at least 2%, at least 3%, at least 4%, at least 5%, at least 6%, at least 7%, at least 8%, at least 9%, at least 10%, at least 11%, at least 12%, at least 13%, at least 14%, at least 15%, at least 16%, at least 17%, at least 18%, at least 19%, at least 20%, at least 21%, at least 22%, at least 23%, at least 24%, at least 25% of genetically abnormal cells (having chromosomal aberrations in human chromosome 3p22.1 and/or 10q22-23) out of the identified lower airway tract cells or lung cells in the sputum sample. It should noted that in many cases, a sputum sample of a subject with lung cancer may include more than 50% of genetically abnormal cells out of the total identified nucleated lower airway tract cells or lung cells.

[0095] According to some embodiments of the invention, the threshold is at least 1, at least 2, at least 3, at least 4, at least 5, at least 6, at least 7, at least 8, at least 9, at least 10, at least 11, at least 12, at least 13, at least 14, at least 15, at least 16, at least 17, at least 18, at least 19, at least 20, at least 21, at least 22, at least 23, at least 24, at least 25, e.g., at least 50, at least 75, at least 100, at least 120, at least 150 genetically abnormal cells (having chromosomal aberrations in human chromosome 3p22.1 and/or 10q22-23) of the identified lower airway tract cells or lung cells in the sputum sample.

[0096] As shown in Example 4, the threshold can vary dependant on the minimal number of lower airway tract cells or lung cells identified by the morphological staining. For example, in samples containing less than 200 target lower airway tract cells or lung cells, the threshold is above 10% (i.e., at least 10% of the cells-of-interest should exhibit genetic abnormalities in human chromosome 3p22.1 and/or 10q22-23). Similarly, in samples containing between 200 and 1000 target lower airway tract cells or lung cells, the threshold is above 7.5%; and in samples containing more than 1000 target lower airway tract cells or lung cells, the threshold is above 5%.

[0097] It should be noted that the sensitivity and specificity of the method can vary depending on the parameters (chromosomal aberrations) used for the “target scan” (i.e., analyzing FISH signals on morphologically identified cells-of-interest which exclude squamous epithelial cells and blood cells present in a sputum sample) and the number of qualified cells-of-interest. For example, as shown in Table 13 (Example 3), when the “Total 3p (−Abn.)/3p # targets” parameter was used [i.e., the sum of “3p # del” (cells showing 2 centromeric signals of chromosome 3 and one green signal at 3p) and “3p # Poly” (cells showing >2 centromeric signals of chromosome 3 and >2 green signals of 3p locus) divided by “3p # targets” (the number of total relevant cells scored using the 3p and 3 cen probes)] and the minimal number of cells-of-interest was higher than 50, a presence of more than 0.04 (i.e., 4%) of genetically abnormal cells was indicative of the diagnosis of lung cancer with a sensitivity of 91.7% and a specificity of ≧80%. On the other hand, when samples which include less than 50 cells were included and scored using the same parameter, the sensitivity was 80% and the cutoff for positive diagnosis was 0.05 (Table 13).

[0098] While further reducing the present invention to practice, the present inventors have uncovered that a higher sensitivity of lung cancer diagnosis can be achieved when cells of a sputum sample are analyzed according to more than one parameter of chromosomal aberrations, such as two parameters of a target scan (see e.g., Table 17, Example 3), or a combination of parameters of “target scan” (as described above) with an “area scan” (analyzing FISH signals on all cell types present in the sputum sample, regardless of their morphological characteristics). For example, as shown in Table 17 (Example 3), using a “target scan” with the “Total 3p (−Abn.)” parameter [i.e., the sum of “3p # del” (cells showing 2 centromeric signals of chromosome 3 and one signal at 3p) and “3p # Poly” (cells showing >2 centromeric signals of chromosome 3 and >2 signals of 3p locus)] with a cutoff of 6 (i.e., a positive diagnosis of lung cancer is made if at least 6 cells of the analyzed cells by the target scan exhibit these chromosomal aberrations) and an “area scan” with the “Total 10q” parameter [i.e., sum of genetic abnormality for chromosome 10 found (10q # del, 10q # Abn, 10q # Poly)] with a cutoff of 1.18% (i.e., a positive diagnosis of lung cancer is made if at least 1.18% of the analyzed cells by the area scan exhibit these chromosomal aberrations), resulted 100% sensitivity and >80% specificity. Thus, a subject is diagnosed with lung cancer if cells of the sputum sample exhibit chromosomal aberrations above the respective cutoffs of either of the two parameters (e.g., an area scan parameter and a target scan parameter).

[0099] Thus, according to an aspect of some embodiment of the invention the method of diagnosing lung cancer is effected by (a) staining a sputum sample with a morphological stain so as to identify lower airway tract cells or lung cells in the sputum sample; (b) staining the sputum sample with FISH so as to identify a genetic abnormality in at least one of human chromosome 3p22.1 and 10q22-23 in cells of the sputum sample, wherein a percentage or number above a predetermined threshold of: (i) the lower airway tract cells or lung cells of the sputum sample identified in step (a) having the genetic abnormality; or (ii) the cells of the sputum sample having the genetic abnormality; is indicative of the lung cancer, thereby diagnosing the lung cancer in the subject.

[0100] According to some embodiments of the invention the adequacy of the sputum sample for FISH analysis is determined by the presence of at least 50 cells of the lower airway tract and/or lungs (as identified by the morphological stain) in the sputum sample.

[0101] A sputum sample that meets the adequacy criteria can be further analyzed for presence of genetic abnormalities in cells of the lower airway tract or lungs of the sputum sample; and/or for the presence of genetic abnormalities in cells of the sputum regardless of the cell's morphology.

[0102] According to some embodiments of the invention, the threshold of the percentage of cells of the sputum sample (all types of cells, regardless their morphology) having the genetic abnormality is at least about 0.16%, at least about 0.18%, at least about 0.20%, at least about 0.22%, at least about 0.24%, at least about 0.26%, at least about 0.28%, at least about 0.30%, at least about 0.35%, at least about 0.40%, at least about 0.45%, at least about 0.50%, at least about 0.55%, at least about 0.60%, at least about 0.65%, at least about 0.70% (e.g., 0.74), at least about 0.75%, at least about 0.80%, at least about 0.85%, at least about 0.90%, at least about 0.95%, at least about 1%, at least about 1.1% (e.g., 1.15%, 1.18%), at least about 1.2%, at least about 1.3%, at least about 1.6%, at least about 2% (e.g., 2.25%), at least about 3%, at least about 3.5% (e.g., 3.75%), at least about 4% (e.g., 4.12%), at least about 5%, at least about 7%, at least about 10%, at least about 20% of the cells of the sputum sample.

[0103] Thus, according to the method of this aspect of the invention, a subject is diagnosed with lung cancer if at least one of the above following two criteria is met, i.e., if the sputum sample includes a percentage or number above a predetermined threshold of lower airway tract cells or lung cells identified by the morphological stain (i.e., classified as lower airway tract cells or lung cells based on the morphological characteristics shown after staining with the morphological stain) and having the genetic abnormality (based on the FISH analysis on the morphologically-identified cells); or if the sputum sample includes a percentage or number of cells above a predetermined threshold [all types of cells, regardless of their morphology or origin, e.g., cells of the lower (e.g., squamous epithelial cells) and upper airway tract and/or blood cells] having the genetic abnormality (based on FISH analysis alone).

[0104] According to some embodiments of the invention, the FISH analysis performed on cells of the sputum sample (regardless of their morphology) can be effected on a different cell sample (smear of sputum cells or cytocentrifuged sputum cells) of the same sputum sample that was found to be adequate (as described above).

[0105] Following is a non-limiting example of the method of diagnosing lung cancer according to the present teachings. A sputum sample is stained with a morphological stain, following which the stained cells are identified based on their morphological characteristics and classified to “target cells” which include lower airway tract cells and lung cells, including cytologically normal and abnormal cells of the lower airway tract or lung origin; or to “non-target cells” which are excluded from the target scan such as squamous epithelial cells or blood cells. The cell coordinates of the target cells are saved for the subsequent target FISH analysis. The cells are destained to remove the morphological stain, and further subjected to FISH analysis to detect chromosomal aberrations in human chromosome 3p22.1 and/or 10q22-23. Following FISH analysis cells with a genetic abnormality in human chromosome 3p22.1 and/or 10q22-23 are identified, regardless of their morphological classification (i.e., all cell types present in the analyzed area), and the percentage of cells having the genetic abnormality is determined (area scan result). Next, FISH analysis is performed on the target cells that were identified by the morphology stain as lower airway tract or lung cells (normal and abnormal cells of the lower airway tract or lung tissue) according to the saved coordinates of these cells. The percentage or number of target cells having the genetic abnormality out of the total identified target cells is determined (target scan result). A diagnosis of lung cancer is made if the result of target scan and/or the area scan is above a predetermined threshold (the respective cutoff for each analysis).

[0106] The morphological stain and the FISH probe specific for human chromosome 3p22.1 and/or 10q22-23 which are described hereinabove for detecting genetically abnormal lower airway tract cells or lung cells and diagnosing lung cancer may be included in a diagnostic kit/article of manufacture preferably along with appropriate instructions for use in detecting genetically abnormal cells and/or diagnosing lung cancer and labels indicating FDA approval for such use(s).

[0107] According to some embodiments of the invention, the instructions comprise a predetermined threshold of a percentage of genetically abnormal cells which is indicative of positive diagnosis of lung cancer.

[0108] Such a kit can include, for example, at least one container including the morphological stain, another container including the FISH probe or a mix of several FISH probes, and optionally also a detection reagent packed in third container (e.g., enzymes, secondary antibodies, buffers, chromogenic substrates, fluorogenic material). The kit may also include appropriate buffers and preservatives for improving the shelf-life of the kit.

[0109] As used herein the term “about” refers to ±10%

[0110] The terms “comprises”, “comprising”, “includes”, “including”, “having” and their conjugates mean “including but not limited to”.

[0111] The term “consisting of means “including and limited to”.

[0112] The term “consisting essentially of” means that the composition, method or structure may include additional ingredients, steps and/or parts, but only if the additional ingredients, steps and/or parts do not materially alter the basic and novel characteristics of the claimed composition, method or structure.

[0113] As used herein, the singular form “a”, “an” and “the” include plural references unless the context clearly dictates otherwise. For example, the term “a compound” or “at least one compound” may include a plurality of compounds, including mixtures thereof.

[0114] Throughout this application, various embodiments of this invention may be presented in a range format. It should be understood that the description in range format is merely for convenience and brevity and should not be construed as an inflexible limitation on the scope of the invention. Accordingly, the description of a range should be considered to have specifically disclosed all the possible subranges as well as individual numerical values within that range. For example, description of a range such as from 1 to 6 should be considered to have specifically disclosed subranges such as from 1 to 3, from 1 to 4, from 1 to 5, from 2 to 4, from 2 to 6, from 3 to 6 etc., as well as individual numbers within that range, for example, 1, 2, 3, 4, 5, and 6. This applies regardless of the breadth of the range.

[0115] Whenever a numerical range is indicated herein, it is meant to include any cited numeral (fractional or integral) within the indicated range. The phrases “ranging/ranges between” a first indicate number and a second indicate number and “ranging/ranges from” a first indicate number “to” a second indicate number are used herein interchangeably and are meant to include the first and second indicated numbers and all the fractional and integral numerals therebetween.

[0116] As used herein the term “method” refers to manners, means, techniques and procedures for accomplishing a given task including, but not limited to, those manners, means, techniques and procedures either known to, or readily developed from known manners, means, techniques and procedures by practitioners of the chemical, pharmacological, biological, biochemical and medical arts.

[0117] It is appreciated that certain features of the invention, which are, for clarity, described in the context of separate embodiments, may also be provided in combination in a single embodiment. Conversely, various features of the invention, which are, for brevity, described in the context of a single embodiment, may also be provided separately or in any suitable subcombination or as suitable in any other described embodiment of the invention. Certain features described in the context of various embodiments are not to be considered essential features of those embodiments, unless the embodiment is inoperative without those elements.

[0118] Various embodiments and aspects of the present invention as delineated hereinabove and as claimed in the claims section below find experimental support in the following examples.

### EXAMPLES

[0119] Reference is now made to the following examples, which together with the above descriptions, illustrate the invention in a non limiting fashion.

[0120] Generally, the nomenclature used herein and the laboratory procedures utilized in the present invention include molecular, biochemical, microbiological and recombinant DNA techniques. Such techniques are thoroughly explained in the literature. See, for example, “Molecular Cloning: A laboratory Manual” Sambrook et al., (1989); “Current Protocols in Molecular Biology” Volumes I-III Ausubel, R. M., ed. (1994); Ausubel et al., “Current Protocols in Molecular Biology”, John Wiley and Sons, Baltimore, Md. (1989); Perbal, “A Practical Guide to Molecular Cloning”, John Wiley & Sons, New York (1988); Watson et al., “Recombinant DNA”, Scientific American Books, New York; Birren et al. (eds) “Genome Analysis: A Laboratory Manual Series”, Vols. 1-4, Cold Spring Harbor Laboratory Press, New York (1998); methodologies as set forth in U.S. Pat. Nos. 4,666,828; 4,683,202; 4,801,531; 5,192,659 and 5,272,057; “Cell Biology: A Laboratory Handbook”, Volumes I-III Cellis, J. E., ed. (1994); “Current Protocols in Immunology” Volumes I-III Coligan J. E., ed. (1994); Stites et al. (eds), “Basic and Clinical Immunology” (8th Edition), Appleton & Lange, Norwalk, Conn. (1994); Mishell and Shiigi (eds), “Selected Methods in Cellular Immunology”, W. H. Freeman and Co., New York (1980); available immunoassays are extensively described in the patent and scientific literature, see, for example, U.S. Pat. Nos. 3,791,932; 3,839,153; 3,850,752; 3,850,578; 3,853,987; 3,867,517; 3,879,262; 3,901,654; 3,935,074; 3,984,533; 3,996,345; 4,034,074; 4,098,876; 4,879,219; 5,011,771 and 5,281,521; “Oligonucleotide Synthesis” Gait, M. J., ed. (1984); “Nucleic Acid Hybridization” Hames, B. D., and Higgins S. J., eds. (1985); “Transcription and Translation” Hames, B. D., and Higgins S. J., Eds. (1984); “Animal Cell Culture” Freshney, R. I., ed. (1986); “Immobilized Cells and Enzymes” IRL Press, (1986); “A Practical Guide to Molecular Cloning” Perbal, B., (1984) and “Methods in Enzymology” Vol. 1-317, Academic Press; “PCR Protocols: A Guide To Methods And Applications”, Academic Press, San Diego, Calif. (1990); Marshak et al., “Strategies for Protein Purification and Characterization—A Laboratory Course Manual” CSHL Press (1996); all of which are incorporated by reference as if fully set forth herein. Blue Histoloy, School of Anatomy and Human Biology, The University of Western Australia, Hypertext Transfer Protocol://World Wide Web (dot) lab (dot) anhb (dot) uwa (dot) edu (dot) au/mb140/CorePages/Respiratory/Respir (dot) htm#LARYNX; Gartner and Hiatt, COLOR TEXTBOOK OF HISTOLOGY, 2nd ed., pp. 343-364; Young and Heath, WHEATER'S FUNCTIONAL HISTOLOGY, 4th ed., pp. 222-236. Other general references are provided throughout this document. The procedures therein are believed to be well known in the art and are provided for the convenience of the reader. All the information contained therein is incorporated herein by reference.

### Example 1

### Valuation of the Diagnosis of Lung Cancer by Analyzing Parallel Sputa Specimens for Cytologic Atypia and Genetic Abnormalities

### Detection of Lung Cancer in Non-Induced Sputum

[0121] Detection of lung cancer by sputum cytology has low sensitivity but is noninvasive and, if improved, could be powerful for early lung cancer detection. The present inventors have tested whether the accuracy of diagnosing lung cancer by evaluating sputa for cytologic atypia and genetic abnormalities is greater than that of conventional cytology alone, as follows.

[0122] Materials and Experimental Methods

[0123] Study design and patient population—In this prospective clinical trial, the present inventors evaluated sputum samples collected from patients with lung cancer and from age-matched healthy (nonsmokers) or high-risk (history of heavy smoking) control subjects. None of the participants had received prior radiotherapy or chemotherapy. The University of Texas M.D. Anderson Cancer Center Investigational Review Board approved this study, and all study participants signed a consent form detailing the research methods. Trained staff interviewers from M.D. Anderson Cancer Center administered an epidemiologic questionnaire to all study participants. Data collected included demographic characteristics and history of tobacco use (9). In the cancer patients who underwent resection, sputum samples were collected before surgery. All high-risk smoker control subjects had helical CT scans negative for detection lung cancer at the time of study entry and for the following 2 years.

[0124] All participants (except for the healthy control subjects, who underwent induced sputum production after saline inhalation with a nebulizer) were instructed to cough into a container that was filled with Sacommano's fixative (90% alcohol, 5% acetic acid, and 5% polyethylene glycol) on 3 consecutive days on arising. Mailed in sputa were cytocentrifuged and filtered through gauze. The sediment was used to prepare at least 10 preparations. For FISH analysis, eight Cytospin preparations were generated on positively charged glass slides using a Shandon Cytospin 2 cytocentrifuge (Thermo Fisher Scientific, Inc., Waltham, Mass.) and fixed in a 4:1 mixture of methanol and acetone. The remaining two preparations were fixed in 95% alcohol for Papanicolaou's staining. Scoring of two Papanicolaou-stained sputa was performed by a cytotechnologist and two senior cytopathologists, none of whom had knowledge of the patients' clinical history. Discrepant diagnoses were scored by consensus over a multiheaded microscope by all three observers (C.A., N.P.C., and R.L.K.). Slides were screened and classified according to a seven-tiered scoring system as follows: negative, squamous metaplasia, mild dysplasia, moderate dysplasia, severe dysplasia, carcinoma, or insufficient for diagnosis. Slides were considered insufficient for diagnosis if they had zero to three histiocytes; excessive cellular degeneration; obscuring bacterial, fungal, or neutrophilic contamination; or limited numbers of epithelial cells.

[0125] In addition, some of the patients with lung cancer who submitted sputa provided subsequent tissue specimens at the time of surgery to resect the tumor as follows: Cytospin preparations of mainstem bronchial brushes on the side of the tumor [TBB] and the normal side contra-lateral to the tumor [NBB] taken just prior to surgery; touch preparations of resected lung cancer [TPP], adjacent normal bronchus [TAB], and distal normal lung tissue [NTP]. These specimens were sent for evaluation of centromeric chromosome 3, chromosome 3p22.1, centromeric chromosome 10, and chromosome 10q22-23, the same genetic markers that were evaluated in sputa. Before evaluation by FISH, touch preparations or Cytospin preparations from bronchial brushes, were evaluated for specimen adequacy and the presence or absence of malignant cells by Papanicolaou's stain. Evaluation of bronchial epithelial and tumor cells is described below.

[0126] FISH analysis—A two-color FISH assay using bacterial artificial chromosome (BAC) probes for 3p22.1 (GenBank Accession No. AC104186) labeled with SPECTRUM GREEN (Vysis) and 10q22-23 (GenBank Accession No. AC068139) labeled with SPECTRUM GREEN (Vysis), combined with commercial centromeric probes for chromosomes 3 (cep 3; Catalogue No. 06J36-003, Vysis, Inc., Downers Grove, Ill.) labeled with SPECTRUM ORANGE (Vysis) and chromosome 10 (cep 10; Catalogue No. 06J36-009, Vysis, Inc., Downers Grove, Ill.)) labeled with SPECTRUM ORANGE (Vysis) was performed on two separate slides (i.e., one slide with the 3p22.1 and centromere 3 probes and another slide with the 10q22-23 and centromere 10 probes).

[0127] The bacterial artificial chromosome clone located at 10q22.2-q23.1 (clone RP11-506MI3; Invitrogen Corp., Carlsbad, Calif.) includes about 180 kilo base pair (kb), and confirmed to contain genomic sequences of SP-A comprising both SFTPA1 (on 10q22.2-q23.1; surfactant protein A1B; also known as PSAP; PSPA; SFTP1; SFTPA1; MGC133365; AC068139.6) and SFTPA2 (on 10q22-q23; surfactant protein A2B; also known as SP-2A; SP-A1; SP-A2; SPAII; SFTPA2; AC068139.3), was isolated and labeled with Spectrum Green dUTP (Vysis) (5). The chromosomal location of the clone was confirmed on a normal metaphase spread in combination with a centromeric 10 probe directly fluorescence labeled with Spectrum Orange (Vysis).

[0128] The BAC clone for 3p22.1 (RP11-391M1), containing about 186 kb of genomic sequences and consisting of four known genes—RPL 14 (on 3p22-p21.2; ribosomal protein L14; also known as L14; RL14; hRL14; CTG-B33; MGC88594; CAG-ISL-7), ENTPD3 [on 3p21.3; ectonucleoside triphosphate diphosphohydrolase 3; also known as HB6; CD39L3; F1193839; NTPDase-3], GC20 [on 3p22.1; also known as eukaryotic translation initiation factor 1B (EIF1B); and translation factor sui1 homolog]—was obtained commercially from Invitrogen and grown in Escherichia coli. It was subsequently isolated, linearized, and labeled with Spectrum Green dUTP according to the manufacturer's directions (Vysis). Localization of the bacterial artificial chromosome clone on chromosome 3 was confirmed by using normal metaphase FISH. One hundred nanograms of each labeled probe was mixed with an equal quantity of human Cot-1 DNA (Life Technologies, Rockville, Md.) in 10 μl of LSI hybridization buffer (Vysis) and mounted on a slide together with 1 μl of either cep 3 (for 3p22.1) or cep 10 (for the SP-A gene on 10q22-23). Hybridization and post-washing were done as described previously (5). Counterstaining of nuclei was performed with 4′,6-diamidino-2-phenylindole and evaluated under a fluorescence microscope equipped with the appropriate filter combinations. If the hybridization signals were deemed satisfactory, the slides were sent for automated FISH scanning.

[0129] Automated FISH scanning—Slides were automatically scanned by the Duet™ (BioView Ltd. Rehovot, Israel). The Duet™ is based on a fully automated microscope (Olympus BX61, Japan), a motorized 8-slides stage (Marzhauser, Wetzler, Germany) and a 3CCD progressive scan color camera (JVC KYF75U, Japan). FISH scanning was performed using ×60 oil objective in fluorescent illumination and by using appropriate filters and a software program specifically designed to capture the orange and green fluorescent signals generated using the above described probes.

[0130] An average of 200 consecutively scanned cells (area scan) per subject were evaluated by two observers, blinded to the subjects' clinical status, using an automated scanning system and fluorescent microscope with custom software for scoring deletions or extra copies of chromosomes 3, 3p22.1, 10, 10q22-23 by FISH.

[0131] By the area scan the sputum samples were evaluated for FISH abnormalities. Only cells that were clearly non-overlapping and complete (e.g., non-ruptured), with well-preserved nuclei, and high-quality fluorescence signals without background fluorescence were scored. For each consecutive cell that was displayed on the video screen, the presence or absence of centromeric probes (orange signals) or locus-specific probes (green signals) relative to the centromere was recorded. No attempt was made to pre-select cells on the basis of nuclear size or shape. At the end of each scan, a pie chart displaying the level of chromosomal abnormalities for each category of aberrations was generated. Two experienced observers who were trained on the system and blinded to the patients' clinical status interactively confirmed the pie chart's classification using a series of filters from the screen or through the microscope within the system. In this way, the numbers of missing signals (deletions) and extra signals (polysomies) were confirmed. If discrepant with the automatically generated pie chart, the cells were reclassified. In addition, it was most important that “split” signals were not counted as two signals. Cells that could not be scored were discarded into an unclassified category.

[0132] The cells were scored as follows and expressed as percentages:

Deletions 3p: One green signal and two orange signals.
Monosomy cep3: One orange signal
Polysomy cep3: More then two orange signals
Polysomy 3p: More than two green signals
Deletions 10q: One green signal and two orange signals.
Monosomy cep10: One orange signal
Polysomy cep10: More then two orange signals
Polysomy 10q: More than two green signals
All Abnormalities 3: Sum all classifications of 3p and cep3.
Del 3p and Poly 3p: Sum deletions 3p and Polysomy 3p.
Aneusomy 3: Sum of monosomy cep3 and Polysomy cep3
All Abnormalities 10: Sum all classifications of 10q and cep10.
Del 10q and Poly 10q: Sum deletions 10q and Polysomy 10q.
Aneusomy 10: Sum of Monosomy cep10 and Polysomy cep10
All 3 abn and 10 abn: Sum all abnormalities for 3p, cep3, 10q and cep10.

[0133] Normal controls consisted of pooled human lymphocytes hybridized and quantitated automatically in the same batches as sputa for 3p22.1 and 10q22-23 as the mean number of cells with summed abnormalities for 3p22.1, cep 3, 10q22-23, and cep 10±1 standard deviation (SD).

[0134] For scoring FISH results from sites other than sputa (e.g., NBB, TBB, TPP, TAB, and NTP), a manual scoring system was used. From the bronchial brush specimens, TAB and NTP deletions of 3p22.1 or 10q22-23 relative to cep 3 or cep 10 were scored in 100 morphologically normal—appearing bronchial epithelial cells. In tumor touch preparations, tumor cells were evaluated for deletions of 3p22.1 and 10q22-23 relative to the internal centromeric probes. The accuracy of manual scoring was confirmed by a random sample check performed by a second cytogenetic technologist.

[0135] Papanicolaou stained sputum preparations—were evaluated by experienced cytopathologists for presence of cancer or cytological atypias according to a six tiered scheme (Franklin W A et al. WHO classification of tumors of the lung, pleura, thymus and heart, IARC press: lyon, 2004, pp. 68-72).

[0136] Statistical analyses—The mean, standard deviation, median, and range for continuous variables were analyzed using Wilcoxon's rank-sum test to assess for differences in the distribution of genetic abnormalities between cancer patients and control subjects. For categorical variables such as sex, smoking history, cytologic diagnosis, and disease stage, Fisher's exact test was used to assess the association between the different variables and cancer status.

[0137] Univariate and multivariate logistic regression models for estimating cancer status were also performed. From the multivariate models, receiver operator characteristic (ROC) curves were produced to estimate each individual's predicted probability of having cancer. In the model, all continuous variables were changed to categorical variables on the basis of their median separately, where the p value cutoff was chosen as 0.10. An ROC curve is a plot of the true-positive rate against the false-positive rate for the different possible cut points of estimated p value. An ideal prediction model will have 100% sensitivity (true positive) and 100% specificity (true negativity). The ROC curve captures the information about how good a prediction model is.

[0138] Correlations of genetic aberrations between epithelial cells from different specimens were performed using Spearman's rank correlation coefficient test.

[0139] Experimental Results

[0140] Patient population—A total of 71 subjects were enrolled in the trial, but five were excluded because they had poor-quality sputum specimens that did not produce evaluable cells for FISH analysis. Of the 66 subjects whose sputa could be evaluated, 35 had predominantly early-stage lung cancer and 31 were control patients, of whom 6 were healthy and 25 were at high risk for lung cancer because of their history of heavy smoking (see Table 1, hereinbelow). The patients with cancer had non-small cell lung cancer (NSCLC), classified predominantly as adenocarcinoma and squamous cell carcinoma. Most of the patients had peripherally based tumors.

TABLE 1
Characteristics of the subjects' populations

| | Cancer | No Cancer |
|---|---|---|
| | (N = 35) | (N = 31) |
| Sex | | |
| Female | 21 | 16 |
| Male | 14 | 15 |
| History of smoking (pack-year) | | |
| 0 | 7 | 6 |
| <20 | 7 | 1 |
| 20-50 | 12 | 16 |
| 50-100 | 6 | 5 |
| >100 | 2 | 1 |
| Age (median, range) | 65 (47-81) | 62 (27-75) |
| Age Mean | 65.1 | 59.2 |
| Stage | | |
| I/IA/IB | 19 | 0 |
| II | 7 | 0 |
| III/IIIA | 6 | 0 |
| IV | 2 | 0 |
| Unknown stage | 1 | |
| Location of Tumor | | |
| Central Tumor | 6 | 0 |
| Peripheral Tumor | 29 | 0 |
| Histology | | |
| Adenocarcinoma | 22 | 0 |
| Squamous Cell Carcinoma | 10 | 0 |
| Neuroendocrine Carcinoma | 2 | 0 |
| Non-small Cell Carcinoma | 1 | 0 |

TABLE 1. Provided are the characteristics of the subjects enrolled in the study, including smoking history (in terms of pack-year, i.e., a Pack Year equals the Number of packs smoked per day * Number of years as a smoker), and tumor's stage (according to Franklin et al staging system, Franklin WA et al. WHO classification of tumors of the lung, pleura, thymus and heart, IARC press: lyon, 2004, pp. 68-72), location and histological evaluation.

[0141] Of the patients with cancer with known stage, 26 patients were lower stage (stages I/IA/IB and II) and 8 were higher stages (stages III, IIIA and IV, Table 1). All patients had non-small cell carcinoma classified according to the WHO classification, predominantly adenocarcinoma and squamous carcinoma. Cytological diagnosis was strongly correlated to cancer status (Table 2). Cytological diagnoses of squamous metaplasia, or mild, moderate and severe dysplasia were significantly associated with cancer status.

TABLE 2
Association between cytologic diagnosis on
sputum and cancer status^{†}

| | Cytologic diagnosis | | | | | |
|---|---|---|---|---|---|---|
| | N (%) | | | | | |
| Cancer status | 1 | 2 | 3 | 4 | 5 | Total |
| Absent | 19 | 2 | 6 | 2 | 2 | 31 |
| | 70.37 | 16.67 | 50.00 | 22.22 | 33.33 | |
| Present | 8 | 10 | 6 | 7 | 4 | 35 |
| | 29.63 | 83.33 | 50.00 | 77.78 | 66.67 | |
| Total | 27 | 12 | 12 | 9 | 6 | 66 |

Table 2: Cytologic diagnosis: 1 = negative, 2 = squamous metaplasia, 3 = mild dysplasia, 4 = moderate dysplasia, and 5 = severe dysplasia.
^{†}p = 0.009 (Fisher's exact test).

[0142] Hybridization efficiency and cutoff values for FISH—Each locus-specific probe was confirmed on metaphases from normal lymphocytes to hybridize to the appropriate centromeric and locus-specific regions for cep 3, 3p22.1, cep 10, and 10q22-23. Cancer patients had an average of 183 cells (median, 131; range, 49-589) evaluated for 3p22.1 and 158 cells (median, 139; range, 35-455) evaluated for 10q22-23. Control subjects had an average of 204 cells evaluated for 3p22.1 (median, 183; range, 40-673) and 170 evaluated for 10q22-23 (median, 189; range, 13-474).

[0143] Similarly, diploid signals were noted for each probe in interphase nuclei from five batches of normal lymphocytes. The mean (±1 SD) in normal lymphocytes of the deletion and polysomy value for 10q22-23 was 1.14±0.59, and that for deletions and polysomies of cep 3 and 3p22.1 was 3.02±1.73. For all chromosomal abnormalities of 3 and 10, the mean and SD were 4.91±2.50.

[0144] Comparison of patient characteristics, genetic changes in sputum and other respiratory tract sites, tumor size, disease stage, and cancer status—There was no significant difference between cancer status for patients' age or smoking history in pack-years. There were, however, significant differences in the percentages of chromosomal abnormalities in epithelial cells in relationship to the patients' cancer status. Significantly more abnormalities in epithelial cells of 3p, deletions of 10q, all abnormalities of 3, deletions and polysomies of 3p, all abnormalities of 10, and all 3 and 10 abnormalities (p values<0.018, <0.013, <0.033, <0.026, <0.018, and <0.008, respectively) were present in the cancer patients than in the control subjects (See Table 3, hereinbelow and FIGS. 1A-F, 2A-D, 3A-E and 4A-D).

TABLE 3
Univariate logistic regression models for the outcome variable

| Variable | Coefficient | P-value | Odds Ratio |
|---|---|---|---|
| Age | 0.05 | 0.047 | 1.05(1.00-1.10) |
| Sex (male vs. female) | −0.34 | 0.494 | 0.71(0.27-1.89) |
| Smoking History (Pack Year) | | | |
| 0-<20 | — | — | |
| 20-50 | −0.9807 | 0.1022 | 0.38(0.12-1.22) |
| >50 | −0.4054 | 0.5687 | 0.67(0.17-2.69) |
| Deletions 3p22.1 | 0.17 | 0.081 | 1.19(0.98-1.43) |
| Abnormalities 3p22.1 | −40.03 | 0.865 | 0 |
| Monosomy cep3 | 0.16 | 0.459 | 1.18(0.77-1.80) |
| Polysomy cep 3 | 0.33 | 0.377 | 1.39(0.67-2.86) |
| Polysomy 3p22.1 | 0.72 | 0.146 | 2.06(0.78-5.8) |
| Deletions 10q22-23 | 0.44 | 0.014 | 1.55(1.09-2.19) |
| Abnormalities 10q22-23 | −0.14 | 0.806 | 0.87(0.27-2.73) |
| Monosomy cep10 | 0.15 | 0.277 | 1.16(0.89-1.51) |
| Polysomy cep10 | −0.41 | 0.444 | 0.67(0.24-1.89) |
| Polysomy 10q22-23 | 0.03 | 0.944 | 1.03(0.44-2.40) |
| All Abn 3 | 0.17 | 0.052 | 1.18(1.00-1.40) |
| Del and Poly 3p22.1 | 0.19 | 0.049 | 1.21(1.00-1.47) |
| Aneusomy 3 | 0.22 | 0.268 | 1.25(0.84-1.85) |
| All Abn 10 | 0.18 | 0.045 | 1.20(1.00-1.43) |
| Del and Poly 10q22-23 | 0.35 | 0.02 | 1.43(1.06-1.92) |
| Aneusomy 10 | 0.11 | 0.388 | 1.11(0.87-1.42) |
| All 3 and 10 abn | 0.15 | 0.01 | 1.17(1.04-1.31) |
| Cytological diagnosis | | | |
| Negative | | | |
| Squamous Metaplasia | 2.47 | 0.005 | 11.87(2.11-66.86) |
| Mild Dysplasia | 0.87 | 0.226 | 2.38(0.59-9.64) |
| Moderate Dysplasia | 2.12 | 0.019 | 8.31(1.41-49.06) |
| Severe Dysplasia | 1.56 | 0.106 | 4.75(0.72-31.37) |

Table 3: For abbreviations of 3, 3p22.1, 10q22-23 and 10, please see text under FISH section. Abn 3 = abnormalities chromosome 3; Abn 10 = abnormalities chromosome 10; Del = deletion; Poly = polysomy; The Odds Ratio (OR) are provided with the confident interval (CI) at 95%.

[0145] In a univariate logistic regression model estimating cancer status (Table 3, hereinabove), the most significant parameters were age, deletions of 3p and 10q, and a variety of abnormalities for 3p22.1 and 10q22-23 and chromosomes 3 and 10 as well as both squamous metaplasia and moderate dysplasia versus negative cytologic results.

[0146] The multivariate logistic regression model to estimate cancer status (Table 4, hereinbelow) selected six variables, two genetic and four cytologic, as the most predictive parameters for estimating cancer status where the p value cutoff point was chosen as 0.10. The variable with the highest odds ratio (OR) was moderate dysplasia (OR 17.96) followed by squamous metaplasia (OR 14.84), severe dysplasia (OR 5.39), mild dysplasia (OR 3.63), deletion and polysomy of 10q22-23 greater or less than 2 (OR 4.38), and deletions and polysomies of 3p and centromeric 3 greater or less than 5 (OR 3.01). The ROC curve (FIG. 5), using a cutoff point of estimated p=0.004, showed the area under the curve to be 0.822 when using both the cytologic and FISH parameters. Using only the selected FISH variables of deletions of 10q and 3 and 3p abnormalities resulted in an ROC curve of 0.682 (p=0.065), whereas using only the cytologic diagnosis resulted in an ROC curve of 0.742 (p=0.040) (FIG. 6).

TABLE 4
Multivariate Logistic Regression Model

| | | | Odds Ratio |
|---|---|---|---|
| Variable | Coefficient | P-value | (95% CI) |
| Intercept | −2.677 | 0.002 | |
| All abnormalities 3/3p | 1.103 | 0.083 | 3.01(0.87-10.50) |
| Deletions and polysomies | 1.477 | 0.033 | 4.38(1.13-17.06) |
| 10/10q | | | |
| Cytological Diagnosis+ | 2.697 | 0.005 | 14.84(2.23-98.53) |
| (2 vs. 1) | | | |
| Cytological Diagnosis | 1.289 | 0.117 | 3.63(0.72-18.20) |
| (3 vs. 1) | | | |
| Cytological Diagnosis | 2.888 | 0.005 | 17.96(2.36-136.92) |
| (4 vs. 1) | | | |
| Cytological Diagnosis | 1.685 | 0.118 | 5.40(0.65-44.68) |
| (5 vs. 1) | | | |

Table 4: +Cytological Diagnosis: 1 = negative; 2 = squamous metaplasia; 3 = mild dyplasia; 4 = moderate dysplasia; 5 = severe dysplasia; vs. = versus.

[0147] If just moderate and severe dysplasia were considered to be predictors of the presence of lung cancer, then the sensitivity and specificity of the sputum cytology test were 32% and 87%, respectively. If only severe dysplasia was considered, the sensitivity of sputum cytology was 11% and the specificity, 99%.

[0148] Table 5 shows the actual probability for the presence of cancer in the sputum for each study participant using a combination of genetic variables and cytologic diagnosis performed on parallel microscopic slides (i.e., not on the same single cells). Assuming a cutoff of p>0.60 (p=a probability index) to indicate high risk for cancer, then 6/31 of the high-risk control subjects and 21/35 of the cancer patients appear to be at high risk for developing cancer,

TABLE 5
Estimates of probability of cancer for each patient by
sputum evaluation of genetic and cytologic variables

| | All | Deletions and | | | |
|---|---|---|---|---|---|
| | abnormalities | polysomies | Cytologic** | | Probability of |
| Patient* | 3/3p# | 10/10q## | Diagnosis | Cancer Status | cancer (p) |
| 1 | 1 | 0 | 3 | absent | 0.429 |
| 2 | 0 | 0 | 5 | absent | 0.271 |
| 3 | 0 | 1 | 1 | absent | 0.232 |
| 4 | 0 | 0 | 1 | absent | 0.064 |
| 5 | 0 | 1 | 1 | absent | 0.232 |
| 6 | 1 | 1 | 1 | absent | 0.476 |
| 7 | 1 | 1 | 3 | absent | 0.767 [symbol] |
| 8 | 1 | 1 | 1 | absent | 0.476 |
| 9 | 1 | 0 | 1 | absent | 0.172 |
| 10 | 0 | 0 | 3 | absent | 0.200 |
| 11 | 1 | 1 | 1 | absent | 0.476 |
| 12 | 1 | 1 | 5 | absent | 0.830 [symbol] |
| 13 | 0 | 1 | 1 | absent | 0.232 |
| 14 | 1 | 0 | 4 | absent | 0.788 [symbol] |
| 15 | 1 | 0 | 3 | absent | 0.429 |
| 16 | 0 | 1 | 2 | absent | 0.817 [symbol] |
| 17 | 0 | 0 | 1 | absent | 0.064 |
| 18C | 0 | 1 | 1 | absent | 0.232 |
| 19C | 0 | 0 | 1 | absent | 0.064 |
| 20C | 1 | 0 | 1 | absent | 0.172 |
| 21C | 0 | 0 | 1 | absent | 0.064 |
| 22C | 0 | 0 | 1 | absent | 0.064 |
| 23C | 0 | 1 | 1 | absent | 0.232 |
| 24 | 1 | 1 | 1 | absent | 0.476 |
| 25 | 0 | 0 | 1 | absent | 0.064 |
| 26 | 1 | 1 | 1 | absent | 0.476 |
| 27 | 0 | 1 | 4 | absent | 0.844 [symbol] |
| 28 | 0 | 1 | 1 | absent | 0.232 |
| 29 | 1 | 0 | 3 | absent | 0.429 |
| 30 | 0 | 0 | 3 | absent | 0.200 |
| 31 | 0 | 1 | 2 | absent | 0.817 [symbol] |
| 32 | 1 | 0 | 2 | present | 0.755 [symbol] |
| 33 | 1 | 1 | 2 | present | 0.931 [symbol] |
| 34 | 1 | 1 | 2 | present | 0.931 [symbol] |
| 35 | 1 | 1 | 2 | present | 0.931 [symbol] |
| 36 | 1 | 1 | 1 | present | 0.476 |
| 37 | 1 | 1 | 1 | present | 0.476 |
| 38 | 1 | 1 | 1 | present | 0.476 |
| 39 | 0 | 1 | 4 | present | 0.844 [symbol] |
| 40 | 1 | 0 | 1 | present | 0.172 |
| 41 | 0 | 1 | 3 | present | 0.522 |
| 42 | 1 | 1 | 3 | present | 0.767 [symbol] |
| 43 | 1 | 1 | 3 | present | 0.767 [symbol] |
| 44 | 1 | 1 | 5 | present | 0.830 [symbol] |
| 45 | 1 | 1 | 3 | present | 0.767 [symbol] |
| 46 | 1 | 0 | 4 | present | 0.788 [symbol] |
| 47 | 0 | 1 | 4 | present | 0.844 [symbol] |
| 48 | 1 | 1 | 1 | present | 0.476 |
| 49 | 0 | 1 | 3 | present | 0.522 |
| 50 | 0 | 0 | 2 | present | 0.505 |
| 51 | 0 | 1 | 5 | present | 0.619 [symbol] |
| 52 | 1 | 1 | 5 | present | 0.830 [symbol] |
| 53 | 0 | 1 | 2 | present | 0.817 [symbol] |
| 54 | 0 | 0 | 4 | present | 0.553 |
| 55 | 0 | 1 | 5 | present | 0.619 [symbol] |
| 56 | 0 | 1 | 2 | present | 0.817 [symbol] |
| 57 | 1 | 1 | 1 | present | 0.476 |
| 58 | 1 | 1 | 2 | present | 0.931 [symbol] |
| 59 | 0 | 1 | 2 | present | 0.817 [symbol] |
| 60 | 0 | 1 | 4 | present | 0.844 [symbol] |
| 61 | 1 | 1 | 1 | present | 0.476 |
| 62 | 1 | 1 | 1 | present | 0.476 |
| 63 | 1 | 1 | 4 | present | 0.942 [symbol] |
| 64 | 0 | 0 | 4 | present | 0.553 |
| 65 | 1 | 1 | 2 | present | 0.931 [symbol] |
| 66 | 0 | 0 | 3 | present | 0.200 |

Table 5: Subjects 1-31 are controls without cancer: subjects 1-17 and 24-31 are high risk controls, and subjects 18-23 are healthy, non-smoking controls (marked with “C”). Patients 32-66 have cancer;
#All abnormalities of centromeric 3/3p22.1 - if the number of all abnormalities of centromeric 3/3p22.1 is <5 = 0, if >5 = 1;
##All deletions and polysomies centromeric 10/10q22-23, if the number of all deletions and polysomies centromeric 10/10q22-23 <2 = 0, if >2 = 1;
**Cytologic Diagnosis: 1 = negative, 2 = squamous metaplasia, 3 = mild dysplasia, 4 = moderate dysplasia, and 5 = severe dysplasia.
Boxes marked with [symbol] refer to high risk controls (6/25) and patients with lung cancer (21/35) who have probability index score above the cutoff of 0.600 (having increased risk of lung cancer).

[0149] Comparison between genetic changes in sputum and paired bronchial brush, tumor, normal lung, and bronchial cells adjacent to tumor—Genetic changes in the TBB, NBB, TPP, NTP and TAB were correlated with those detected in the sputum samples from the 16 lung cancer patients who underwent resection. There were significant correlations between abnormalities of chromosome 10 and 10q22-23 in the sputum and those in the TBB (Table 6), while abnormalities for 3 and 3p correlated negatively with 10q deletions in the TAB, and NBB.

TABLE 6
Correlation between genetic abnormalities in sputum and at different sites in the
respiratory tract in 16 patients*

| | | | TBB del 10q22-23 |
|---|---|---|---|
| | TAB del 10q22-23 | NBB del 10q22-23 | Correlation |
| | Correlation Coefficient | Correlation Coefficient | Coefficient |
| Sputum | (P-value) | (P-value) | (P-value) |
| Polysomy cep3 | −0.728 (0.026) | 0.114 (0.673) | 0.189 (0.331) |
| Polysomy 3p22.1 | 0.370 (0.327) | −0.632 (0.0086) | −0.260 (0.331) |
| Del 10q22-23 | −0.100 (0.806) | 0.139 (0.609) | 0.521 (0.0385) |
| Deletion/polysomy | | 0.075 (0.784) | 0.532 (0.034) |
| Cen10 or 10q22-23 | | | |

Table 6:
TBB: bronchial brush on tumor side;
NBB: bronchial brush on non-tumor side;
TAB: touch preparations from bronchus adjacent to tumor;
*The Spearman association among FISH parameters; del: deletion

[0150] Summary of results—Automated scoring of genetic abnormalities for 3p22.1 and 10q22-23 by fluorescence in situ hybridization (FISH) and conventional cytology performed on parallel slides was done on sputa from 35 subjects with lung cancer, 25 high-risk smokers, and six healthy control subjects. Correlation of FISH abnormalities between sputum and bronchial epithelial cells from the main stem and adjacent to tumor bronchi was performed in 16 patients who underwent resection for lung cancer. A multivariate analysis selected variables that most accurately predicted lung cancer. A model of probability for the presence of lung cancer was derived for each subject.

[0151] Cells exfoliated from patients with lung cancer contained genetic aberrations and cytologic atypias at significantly higher levels than in those from control subjects. If just moderate and severe dysplasia were considered as predictors of the presence of lung cancer, then the sensitivity and specificity of the sputum cytology test was 31.4% and 87%, respectively. If only severe dysplasia was considered as predictor for lung cancer the sensitivity of cytology was 11.4% and the specificity 93.5% to predict the presence of cancer. Molecular abnormalities in sputum correlated significantly with those in bronchial cells from other sites within the respiratory tract, confirming the field effect. When combined with cytologic atypia (on parallel slides), a model of risk for lung cancer was derived that had 60% (21/35) sensitivity and 81% (25/31) specificity to predict the presence of lung cancer.

[0152] Conclusions: For diagnosing lung cancer in sputum, a combination of molecular and cytologic variables (performed independently on the same sputum samples but on parallel slides) was superior to using conventional cytology alone.

[0153] Analysis and discussion—Because of CT's high sensitivity but lack of specificity, it would be desirable to develop a minimally invasive test for genetic susceptibility that may assist in identifying those individuals at highest risk for developing lung cancer. Detecting obvious cytologic atypia in the sputum may be more reflective of neoplastic events in the central than the peripheral airways and, from this aspect, would be superior to CT, which does not easily detect central airway lesions. However, conventional cytologic sputum screening lacks sensitivity for various reasons, including difficulties to detect small atypical squamous cells, the fact that abnormal cells may not be shed from peripherally based lesions, the patient's inability to produce an adequate cough specimen, and contamination of the specimen by oral superficial squamous cells and bacteria.

[0154] In this study, the present inventors found that epithelial cells in spontaneously produced sputum from patients with lung cancer had significantly higher levels of chromosomal abnormalities in centromeric 3, 3p22.1, centromeric 10, and 10q22-23 than did sputum from an age-matched cohort of high-risk smokers who were clinically negative for lung cancer. Genetic abnormalities occurred in the epithelial cells of subjects with negative cytologic findings as well as in those from subjects with squamous metaplasia or mild, moderate, or severe dysplasia. Abnormalities of 10q22-23, centromeric 3, and 3p22.1 were selected as being significant predictors of lung cancer. Additionally, the presence of squamous metaplasia or mild, moderate, or severe dysplasia was shown to have a high OR of predicting for lung cancer. In current clinical practice, a cytologic diagnosis of squamous metaplasia or mild dysplasia would not be considered diagnostic for malignancy. The findings in this study demonstrate that squamous metaplasia and all degrees of dysplasia are present at a significant level in patients with lung cancer. Previous studies showed that cytology, with the exception of moderate and severe dysplasia, has low sensitivity in the detection of cancer.

[0155] Based on the present study, subjects in a high-risk group, with high probability scores derived from cytologic and FISH analyses according to the study's model, should undergo CT scanning. If the CT findings are negative, these subjects would be ideal candidates to undergo fluorescence bronchoscopy to exclude the presence of central airway preinvasive malignant lesions. In the present study there were 6 high risk patients without CT evidence of lung cancer that might qualify for bronchoscopy based on their probability scores. The finding of a low probability score in several of the lung cancer patients may reflect an inadequate sputum sample. Use of induced sputa and stricter criteria for adequacy, such as the presence of bronchial epithelial cells and a greater number of histiocytes (lung macrophages) may improve the accuracy of the test.

[0156] The results of this study validated the approach to measuring and quantitating molecular abnormalities in consecutive fields of epithelial cells that were not necessarily cytologically abnormal. The significant correlation between chromosomal abnormalities in epithelial cells exfoliated in sputum and in those obtained by bronchial brushing of the main stem bronchi confirmed the hypothesis that cellular genetic abnormalities of 3p22.1 and 10q22-23 reflect a field cancerization effect within the bronchial cells of individuals at high risk for developing cancer. This field effect is the result of susceptibility to genetic damage at 3p22.1 and 10q22-23, caused by carcinogens such as cigarette smoke or atmospheric pollutants, that persists most likely because of an impaired ability to repair the DNA damage. The present inventors have previously demonstrated that this field effect is more pronounced on the side of the tumor than on the contralateral side.

[0157] Other investigators tested epithelial cells in sputum by FISH using a commercial probe set for four different chromosomal regions (5p15, 6 μl-q11, 7p12 (including epidermal growth factor receptor), and 8q24 (including C-myc) and required a positive sputum diagnosis to be based on DNA copy number gains for at least two probes in a minimum of two or three cells. Using this approach, the sensitivity (50%) and specificity (81%) of FISH did not exceed the sensitivity of sputum cytology to detect lung cancer. Furthermore, with this probe set, heavy tobacco smokers and asbestos-exposed workers had FISH results similar to those seen in never-smokers, suggesting that the composition of these probes was not optimal for detecting early lung cancer in high-risk populations. In contrast, others reported that FISH combined with cytology led to an improved diagnosis of malignancy. In a recent study, combined genetic aberrations for genes HYAL2 and FHIT on chromosome 3p were found by FISH in 76% of sputa from patients with cancer but in only 47% of cases that were considered positive on cytology, demonstrating, like in the present study, that with an appropriate choice of probes, FISH can detect abnormal cells that may be undetectable by cytology.

[0158] The sputum probe set of 3p22.1 and 10q22-23 was selected on the basis of results of high-resolution comparative genomic hybridization analysis of cDNA microarrays in adenocarcinomas and squamous cell carcinomas that showed high levels of these deletions, relative to those in normal human bronchial epithelial cells, in almost all tumors tested. These same probes were subsequently tested by FISH in adenocarcinomas and squamous cell carcinomas and found to correlate significantly with the results of the comparative genomic hybridization.

[0159] Deletion of SP-A are frequent in lung cancer as well as in adjacent bronchi, normal lung, and bronchial cells from main stem bronchi on the normal and tumor sides. The present inventors have shown that deletions of SP-A in lung cancer cells are inversely related to telomere length and significantly associated with overexpression of the gene for hTERT and high telomerase expression. Furthermore, deletions of SP-A in bronchial cells adjacent to the tumor are significantly associated with a poor prognosis in early-stage lung cancer. SP-A is present in type 2 alveolar epithelial cells, which are considered lung cancer stem cells and are involved in alveolar repair after lung injury. Studies in a rat hyperoxia model identified a subpopulation of type 2 alveolar cells with high telomerase activity that were resistant to injury and capable of proliferation.

[0160] Chromosome 3p deletion is currently the most common finding in lung cancer, and it occurs more frequently in the lung tumor tissues of patients who smoke than it does in those of nonsmoking patients. Furthermore, allelic losses at one or more chromosome 3p21.3 locus are the most frequent chromosomal abnormalities detected in the bronchial epithelia of smokers and are detected even in normal bronchial mucosae of smokers. Therefore, deletions in this region have been proposed as useful markers in smoking-related target epithelia for assessing risk.

[0161] The use of FISH for diagnostic purposes has increased considerably in the last few years, primarily because FISH permits visualization and examination of genetic aberrations as rare events in a large number of cells that may have normal genetic composition. FISH is ideally suited for cytologic specimens such as sputum, which may be obtained spontaneously by coughing or induced by inhalation of nebulized saline. The major value of sputum biomarkers is to identify patients at high risk for cancer-related events, such as the development of premalignant lesions or early cancers, so that these patients may be subject to intense surveillance either by fluorescent bronchoscopic examination with removal of neoplastic lesions or by regular helical CT scanning of lungs to detect peripheral carcinomas. Additionally, this is an ideal population to benefit from the use of chemopreventive agents and smoking-cessation counseling.

[0162] In summary, the present inventors used an automated quantitative system to score FISH abnormalities in epithelial cells from non-induced sputum specimens from lung cancer patients, which resulted in a gallery of cells that could then be interactively classified in conjunction with morphologic findings. Software programs specific to the sputum application and the size of the probes and specific filter sets were used to maximize the accuracy of the testing. Correlating the sputum findings with disease state per individual, the present inventors discovered that epithelial cells in sputum from patients with NSCLC were cytologically and genetically abnormal relative to those from a high-risk control group with no CT evidence of lung cancer as well as healthy controls. On the basis of the results of the model for risk of lung cancer, which should be validated in a larger study, it may be concluded that the best predictive sputum assay for lung cancer will be a combination of morphologic characteristics determined cytologically and quantitation of molecular abnormalities in both atypical cells and morphologically normal cells.

### Example 2

### Classification of Cells which are Relevant for Fish Analysis In a Sputum Sample

[0163] Morphological stains which enable visualization of the morphological characteristics of the cells are used for classifying the cells present in the sputum sample to cells which are relevant for FISH analysis, i.e., the target cells for analysis by cytogenetical staining and non-relevant cells which are excluded from FISH analysis. A sputum sample may include cells of the lower airway tract (bronchial cells and cells lining the conductive passages of the lower respiratory tract), lung cells, cells of the upper respiratory tract (cells lining the upper part of the trachea, pharynx, larynx and mouth), blood cells and other cells. It should be noted that a sputum sample may also include abnormal cells, such as cells derived from the lower respiratory tract, bronchioles and lungs which underwent morphological changes (including reversible and non-reversible change). Non-limiting examples of such cells are squamous metaplasia cells, squamous atypia and squamous dysplasia cells.

[0164] I. Cells which are Relevant for Analysis (Targeted for a Subsequent FISH Analysis)

[0165] Respiratory cells—Cells of the conductive passages of the lower respiratory tract which can be found in a sputum sample include, but are not limited to, respiratory epithelial cells such as goblet cells, ciliated cells and non-ciliated cells.

[0166] Goblet cells—are columnar cells with vacuolated, faintly stained basophilic cytoplasm and peripheral nucleus (see for example, FIG. 10C).

[0167] Ciliated cells—have a length which is at least twice of their width, having variable size are recognized by their terminal plate, cilia and tapering ends (see for example, FIG. 10A).

[0168] Non-ciliated cells (also called Clara cells)—are serous glandular cells that secrete a surfactant-like material that appears to coat and protect the bronchiolar lining (see for example, FIG. 10B). The non-ciliated cells are bronchial epithelial cells that don't have cilia.

[0169] When reaching the smallest bronchioles, goblet cells disappear while there are still ciliated cells present.

[0170] Cells of the lung which may be included in a sputum sample include epithelial cells of the alveoli (Alveolar type I cells and Alveolar type II cells) and alveolar macrophages.

[0171] Alveolar type I cells—Small alveolar cells or type I pneumocytes are extremely flattened (the cell may be as thin as 0.05 μm) and form most (95%) of the surface of the alveolar walls (see for example, FIG. 13B).

[0172] Alveolar type II cells—large alveolar cells or type II pneumocytes, are small, round, single cells (appear alone, as compared with Alveolar type I cells which line side by side and form surface of the alveolar walls). The Alveolar type II form small bulges on the alveolar walls with vacuolated cytoplasm and central nuclei having one to two nucleoli, contain large number of granules called cytosomes (or multilamellar bodies), which consist of precursors to pulmonary surfactant (see FIGS. 13A and 13B).

[0173] Alveolar macrophages—The non-epithelial cells are predominantly pulmonary macrophages derived from the alveoli. Invariably these contain variable amounts of black granular material or dust. Their presence indicates adequacy of sputum specimen.

[0174] II. Identification of respiratory tract cells of a sputum sample having abnormal morphology—In the presence of consistent irritation of the airway tract and the lungs such in the case of tobacco smoke or inhalation of other pollutants, a series of morphological changes occur that may lead to the progression of carcinoma. Early changes include a loss of the ciliated columnar epithelium, basal cell hyperplasia, and the formation of a low columnar epithelium without cilia. These changes are followed by a squamous metaplasia. Metaplasia is the reversible replacement of one differentiated cell type with another mature differentiated cell type, while Atypia and Dysplasia are a clinical term for irreversible abnormality in a cell that can develop to cancer. As cellular atypia develops and advances there is progression through mild, moderate and severe dysplasia to carcinoma. Therefore, a sputum sample may include various cell types derived from bronchial epithelium representing the cytology changes as cells progress along the multistep pathway from inflammation to lung cancer.

[0175] Squamous metaplasia cells—are bronchial epithelial cells in which the normal ciliated columnar shape is replaced by a squamous epithelium shape. This transformation from a glandular epithelium to squamous epithelium is known as squamous metaplasia.

[0176] Squamous atypia cells (atypical squamous metaplastic)—Atypia is a clinical term for abnormality in a squamous cell. It may or may not be a precancerous indication associated with later malignancy, but the level of appropriate concern is highly dependent on the context with which it is diagnosed (See FIG. 15).

[0177] Squamous metaplastic cells—are considered suspicious for squamous cell carcinoma as their nuclei become hyperchromatic and angulated, (see e.g., FIGS. 7A-C).

[0178] Squamous dysplasia cells—Squamous dysplasia is the earliest form of pre-cancerous lesion recognizable, characterized by the presence of at least some squamous features in the cytoplasm of the abnormal cells. These include a sharp border, orange, or deep basophilic staining of the cytoplasmic keratin, and filaments of keratin ringing the outer diameter of the cell.

[0179] The grade of dysplasia mirrors the maturity of the cells involved. For example, cells of mild dysplasia resemble mature metaplastic, superficial and intermediate cells while more severely dysplastic epithelium reflects less mature normal epithelium such as parabasal and/or immature metaplastic type cells.

[0180] Mild dysplasia involves chiefly the deeper layers of the epithelium (inner one third of the epithelial thickness). In moderate dysplasia the abnormal changes move toward the surface involving the inner two thirds of the thickness of the epithelium.

[0181] Severe dysplasia is used by some as synonymous with squamous carcinoma in situ while others use the term to describe changes including almost all of the epithelium, but falling just short of carcinoma in situ.

[0182] Cellular changes in dysplasia are those of nuclear pleomorphism, hyperchromia (increase in nuclear chromatin) causing deeper nuclear staining, prominent nucleoli, increased nuclear-cytoplasmic ratio, increased mitoses, loss of cellular polarity and crowding of cells.

[0183] III. Cells of a Sputum Sample which are not Relevant for a Subsequent Cytogenetical (FISH) Analysis (Non-Targeted Cells, Excluded from Analysis)

[0184] Cells of the upper respiratory tract which may be included in the sputum sample include squamous epithelial cell.

[0185] Squamous epithelial normal cells—Squamous epithelial cell are irregularly shaped and very flat cells, such as superficial squamous epithelial cells and intermediate squamous cells (see e.g., FIG. 7J).

[0186] Blood cells—Red and white blood cells might be present in the sputum due to infection or irritation of the respiratory tract. These cells may be recognized by their small size compared to the other cell types found in sputum. Red blood cells are a-nucleated, and the white blood cells include lymphocytes, polymorphonuclear (PMN) cells, and other white blood cells (WBC) (se FIG. 14 for exemplary blood cells).

[0187] As described in the Background section multiple clonal abnormalities arising within lower airway tract and lung cells are associated with lung cancer the cells-of-interest which are identified in the sputum sample by the morphological stain include, but are not limited to lower airway tract cells such as goblet cells, ciliated cells and non-ciliated cells; and lung cells such as alveolar type I cells, alveolar type II cells and alveolar macrophages.

[0188] Cells of a sputum sample which are excluded from the subsequent FISH scan (non-targeted cells) include normal squamous epithelial cells and blood cells.

### Example 3

### Determination of Significant Parameters for Combined Analysis of Morphology and Fish for Detection of Lung Cancer in Induced Sputum

[0189] Evaluation of induced sputum samples from 33 subjects: 15 patients diagnosed with lung cancer and from 18 healthy non-smoking controls.

[0190] Materials and Methods

[0191] Study Design and Patient Population—The local ethical review committee approved the study and informed consent was obtained from all patients. All patients had bronchoscopy. Final diagnosis of cancer based on histology or cytology material from bronchoscopy, transthoracic fine needle aspiration or surgical specimen. Sputum samples were collected before bronchoscopy. In the cancer patients who underwent resection, sputum samples were collected before surgery. All participants underwent induced sputum production after saline inhalation with an ultrasonic nebulizer, to maximize the yield of cells from the airways. Sputum samples were analyzed blindly.

[0192] Sputum production and processing—Sputum samples were collected in a container filled with Sacommano's fixative (50% alcohol which contains 2% Carbowax). Sputum samples were washed in PBS×1, centrifuged and the cell pellet was resuspended in sputolysin for 15 minutes at 37° C. After another centrifugation, cell pellet was washed again in PBS×1, and placed onto silane-coated glass slides using cytocentrifuge (Shandon Cytospin 2, Thermo Fisher Scientific, Inc., Waltham, Mass.) in 50% ethanol (EtOH). Cytospin slides were fixed in 95% alcohol and were kept wrapped in aluminum fold at −20° C. until further processing. The sediment was used to prepare at least 12 cytospin slides.

[0193] Morphological staining—Slides were stained in May-Grünwald Giemsa stain (Sigma, St Louis, Mo., USA) and air-dried.

[0194] Destaining and pretreatment—Slides were immersed in Carnoy's fixative for 1 hour and washed once in 1×PBS, 5 minutes each. The, slides were digested in 10 mM HCl/0.05% digestion enzyme (BioView Ltd. Rehovot, Israel) for approximately 15 minutes at 37° C., following which the slides were washed in 1×PBS for 5 minutes, fixed in 1% formaldehyde/PBS for 5 minutes, washed twice in 1×PBS for 5 minutes each and dehydrated in an ice-cold ethanol series (70, 80, 100%).

[0195] FISH—Two bacterial artificial chromosome (bac) clones, commercially available from Invitrogene (Carlsbad, Calif.) were used for the FISH analysis:
[0196] 1. RP11-506MI3—clone of 180 kb, located at 10q22.2-q23.1 and confirmed to contain genomic sequences of SP-A comprising both SFTPA1 and SFTPA2
[0197] 2. RP11-391M1 clone located at 3p22.1, containing almost 200 kb of genomic sequences and consisting of four known genes—RPL 14, CD39A, GC20 translation factor sui1 homolog, and PMGM.

[0198] Clones were isolated and labeled with Spectrum Green dUTP (Vysis Inc., Downers Grove, Ill.) according to the manufacturer's instructions. Localization of the bacterial artificial chromosome clone on chromosomes 3 and 10 was confirmed by using normal metaphase FISH.

[0199] A two-color FISH assay using the Spectrum Green labeled bac probes, combined with commercial centromeric probes for chromosomes 3 and 10 labeled in Spectrum Orange (cep 3 and cep 10; Vysis, Inc., Downers Grove, Ill.) was performed on two separate slides. One hundred nanograms of each labeled probe was mixed with an equal quantity of human Cot-1 DNA (Life Technologies, Rockville, Md.) in 10 μl of LSI hybridization buffer (Vysis) and mounted on a slide together with 1 μl of either cep 3 (for 3p22.1) or cep 10 (for 10q22-23). The probe and target DNA were co-denatured at 74° C. for 4 minutes and hybridized at 37° C. overnight in a humidified chamber. Post-hybridization washes were performed in 0.4×SSC for 2 minutes at 75° C. followed by 2×SSC/0.1% NP-40 at room temperature. Slides were counterstained in BlueView (BioView Ltd, Rehovot, Israel) and evaluated under a fluorescence microscope equipped with the appropriate filter combinations. If the hybridization signals were deemed satisfactory, the slides were sent for automated FISH scanning. Counterstaining of nuclei was performed with DAPI and evaluated under a fluorescent microscope equipped with the appropriate filter combinations.

[0200] Automated FISH Scanning—Slides were automatically scanned by the Duet™ (BioView Ltd. Rehovot, Israel). The Duet™ is based on a fully automated microscope (Olympus BX61, Japan), a motorized 8-slides stage (Marzhauser, Wetzler, Germany) and a 3CCD progressive scan color camera (JVC KYF75U, Japan). The system allows the same slide to be scanned twice in two different staining: morphology and FISH. The coordinates and images of all cells found in the first scan are saved and matched to the fluorescent images of the second scan. Morphology scans were performed in bright-light using ×20 dry objective. FISH scanning was performed using ×60 oil objective in fluorescent illumination and by using appropriate filters and a software program specifically designed to capture and analyze the specific signal patterns generated by our probes. While scanning, the system produces images of all captured cells that can be further reviewed by the operator.

[0201] “Area scan”—Slides were scanned under fluorescent filters (Dark field imaging) suitable for viewing the FISH probes. All cells were classified according to a six tiered scoring system as follows: “Normal cells”—two copies of the gene and two centromeres, “deletion 1”—one copy of the gene is missing, “deletion 2”—two copies of the gene are missing, “Abnormal”—one extra copy of the centromere compared to the gene, “Polysomy, Extra Gene”—more than two copies of the gene and the centromeres.

[0202] “Target scan”—In order to correlate morphological changes with genetic aberrations on the same single cell the “target scan” was applied. Slides were first scanned under Bright field scan to identify relevant cells (i.e., cells exhibiting morphological characteristics typical to pre-defined cell types, e.g., as described in FIGS. 7A-I; and Example 2) which excluded squamous epithelial cells and blood cells and then the identified cells were confirmed manually and re-scanned by fluorescent mode to identify abnormalities by FISH staining. FISH abnormalities were classified to “Normal cells”; “deletion 1”; “deletion 2”; “Abnormal”; “Polysomy, Extra Gene” as described hereinabove.

[0203] Cells were classified according to the classes specified in the six tiered scoring system (Franklin W A et al. WHO classification of tumors of the lung, pleura, thymus and heart, IARC press: lyon, 2004, pp. 68-72).

[0204] Two slides were scanned for each sputum samples: one slide was hybridized to the 3p and its control centromere and the second slide was hybridized to the 10q probe and centromere 10. Each slide was scanned twice: 1) Area scan—at least 300 consecutive epithelial cells were selected randomly and analyzed, regardless of their morphology, and 2) Target scan—“target cells” were defined as normal and atypical cells derived from the airways. Following morphology scan, cells were subjected into the “target cells” class (both manually and automatically) based on their morphology. During FISH scan, only the pre-selected “target cells”, were automatically scanned and classified by their signal pattern. Samples with less than 50 target cells were excluded from the study.

[0205] For each cell, the presence or absence of centromeric probes (orange signals) or locus-specific probes (green signals) was recorded. Cells were classified into 3 major sub-groups: a) Normal—displaying 2 centromeric and 2 locus-specific signals; b) Deletion—displaying 2 centromeric and 1 locus specific signals; c) Polysomy—displaying multiple gains of both centromere and locus specific signals.

[0206] Only cells that were clearly non-overlapping and complete, with well-preserved nuclei, with high-quality fluorescence signals and without background fluorescence were scored. At the end of each scan, the images of all cells that were scanned and analyzed were displayed and a pie chart summarizing the chromosomal abnormalities found in each scan was generated. Two experienced observers, who were trained on the system and blinded to the patients' clinical status confirmed the automatic classification and reclassified cells that were misinterpreted by the system.

[0207] Inclusion and exclusion criteria—All patients included in the study had cytological or histological approved cancer. None of the participants had received prior diagnosis radiotherapy or chemotherapy. Following the morphology scan, the adequacy of the sample was evaluated by an expert technician. Slides were considered insufficient for diagnosis if they had less than 50 relevant target cells; including atypical cells, normal bronchial epithelial cells, and metaplastic cells. Slides with insufficient hybridization (i.e. weak signals, high fluorescent background, etc) were excluded from the study as well.

[0208] Statistical Analyses—All the parameters were tabulated using descriptive statistics. Simple comparison between the groups was done using the non-parametric Wilcoxon's rank-sum test. Sensitivity/specificity analysis was done by searching for the cutoff that yields the highest sensitivity given fixed specificity of at least 80%. This was performed once for the entire data and once for data excluding outlying observations. A value was considered to be an outlier if it was higher than 1.5 times the inter-quartile range above the 3rd quartile. This method was chosen as this study is an exploratory study aimed to detect any possible diagnostic parameters

[0209] Data Description—Data was recorded in Excel file which included patient identification number (ID), Diagnosis (Control/Lung Cancer) and 30 parameters, divided into Target scan parameters and Area scan parameters. Fifteen (15) subjects with diagnosed lung cancer and 18 healthy non-smoking controls were blindly tested.

[0210] Description of parameters—

[0211] 3p # targets—Number of total relevant cells (target cells) scored using the 3p and 3 cen probe;

[0212] 3p # del—Cells showing 2 centromeric signals of chromosome 3 (in red) and one green signal at 3p;

[0213] 3p # Abn.—Cells showing 3 centromeric signals of chromosome 3 (in red) and 2 green signals at 3p (chromosomal gain and deletion of 3p locus);

[0214] 3p # Poly—Cells showing >2 centromeric signals of chromosome 3 (in red) and >2 green signals of 3p locus;

[0215] Total 3p—Sum of genetic abnormality for chromosome 3 found (3p # del, 3p # Abn, 3p # Poly);

[0216] Total 3p (−Abn.)—Sum of 3p # del and 3p # Poly);

[0217] 10q # targets—Number of total relevant cells (target cells) scored using the 10q and 10 cen probe;

[0218] 10q # del—Cells showing 2 centromeric signals of chromosome 10 (in red) and one green signal at 10q;

[0219] 10q # Abn.—Cells showing 3 centromeric signals of chromosome 10 (in red) and 2 green signals at 10q (chromosomal gain and deletion of 3p locus);

[0220] 10q # Poly—Cells showing >2 centromeric signals of chromosome 10 (in red) and >2 green signals of 10q locus;

[0221] Total 10q—Sum of genetic abnormality for chromosome 10 found (10q # del, 10q # Abn, 10q # Poly);

[0222] Total 10q (−Abn.)—Sum of 10q # del and 10q # Poly);

[0223] Total 3p, 10q—Sum of genetic abnormality for chromosome 3 and 10 found (3p & 10q # del, 3p & 10q # Abn, 3p & 10q # Poly);

[0224] Total 3p, 10q (−Abn.)—Sum of 3p & 10q # del and 3p & 10q # Poly);

[0225] LAV # Abn.—Number of cells showing abnormality (polysomies) using the LAVysion prone kit;

[0226] Total 3p (−Abn.)/3p # targets—Sum of 3p # del and 3p # Poly) divided by the number of total relevant cells (target cells) scored using the 3p and 3 cen probe;

[0227] Total 3p/3p # targets—Sum of genetic abnormality for chromosome 3 found (3p # del, 3p # Abn, 3p # Poly) divided by the number of total relevant cells (target cells) scored using the 3p and 3 cen probe;

[0228] Total 10q (−Abn.)/10q # targets—Sum of 10q # del and 10q # Poly) divided by the number of total relevant cells (target cells) scored using the 10q and 10 cen probe;

[0229] Total 10q/10q # targets—Sum of genetic abnormality for chromosome 10 found (10q # del, 10q # Abn, 10q # Poly) divided by the number of total relevant cells (target cells) scored using the 10q and 10 cen probe;

[0230] Statistical Analysis Methods

[0231] Sensitivity/Specificity Analysis—All the parameters were tabulated using descriptive statistics. Simple comparison between the groups was done using the non-parametric Wilcoxon's rank-sum test. Four additional measures were calculated based on the Target statistics and were added to the descriptive analysis. Those were:
[0232] 1. Total 3p/3p # targets, i.e., the total chromosome 3 (i.e., centromere 3+3p22.1) genetic aberrations identified in a sample out of the total cells in the sample targeted for analysis by FISH;
[0233] 2. Total 3p (−abn.)/3p # targets, i.e., the total chromosome 3 genetic aberrations not including the class of 3p22.1 abnormalities (i.e., 3 signals of the centromeric probe of chromosome 3 and 2 signals of the 3p22.1, which reflects amplification of chromosome 3 with a deletion of the 3p22.1 locus) identified in a sample out of the total cells in the sample analyzed by FISH.
[0234] 3. Total 10q/10q # targets i.e., the total chromosome 10 genetic aberrations (i.e., centromere 10 and 10q22-23) identified in a sample out of the total cells analyzed by FISH in the sample.
[0235] 4. Total 10q (−Abn.)/10q # targets, i.e., the total chromosome 10 genetic aberrations not including the class of 10q22-23 abnormalities [i.e., 3 signals of the centromeric 10 probe and 2 signals of the 10q22-23, which reflects amplification of chromosome 10 with a deletion of the 10q22-23 locus) identified in a sample out of the total cells analyzed by FISH in the sample.

[0236] Sensitivity/specificity analysis was done first using a single parameter, simply by searching for the cutoff that yields the highest Youden's Index (defined as the sum of sensitivity and specificity) or the cutoff that yields the highest sensitivity given a fixed specificity of at least 80%. This was performed once for the entire data and once for data excluding outlying observations (outlying values). A value was considered to be an outlier if it was higher than 1.5 times the inter-quartile range above the 3^{rd} quartile. A list of all outliers is presented in Table 20.

[0237] The same sensitivity/specificity analysis was performed using a combination of two parameters as described below. The optimal cutoffs (one for each parameter) were the combination of two cutoffs that yielded the highest Youden's Index given two types of decision rules:

[0238] Decision rule 1: A subject is classified as having lung cancer if both parameters are above their respective cutoffs.

[0239] Decision rule 2: A subject is classified as having lung cancer if at least one of the two parameters is above its respective cutoff.

[0240] The comparison of the prediction power between the tested parameters and LAVysion probe kit (Vysis) was assessed by comparing the proportion of true predictions (number of true positive+number of true negative divided by the total number of subjects) using logistic regression.

[0241] Both the single parameter analysis and the two parameters analysis were repeated using a subset of the data that excludes subjects with less than 50 targets (i.e., less than 50 relevant cells for targeted scan) collected to calculate the target statistics. Six subjects were excluded from this analysis—3 from the Control group (IS-107, IS-110, IS-153) and 3 from the Lung Cancer group (IS-10, IS-21, IS-150).

[0242] Power Analysis—Power analysis was performed to evaluate the number of subjects required to achieve 80% power under different scenarios. Various “true” sensitivity rates were compared to a constant proportion using an exact binomial two-sided test.

[0243] Results

[0244] Descriptive statistics—The following Tables present descriptive statistics for each parameter along with the p-value from the Wilcoxon test. Table 7, presents the Target parameters (using target scan) and Table 8 presents the Area parameters.

TABLE 7
Descriptive statistics for target parameters by diagnosis

| Parameter/Diagnostic | | Mean | Std | Min | Median | Max | N | P-value |
|---|---|---|---|---|---|---|---|---|
| 3p # targets | Lung Cancer | 193.7 | 126.9 | 14.0 | 152.0 | 409.0 | 15 | 0.9856 |
| | Control | 237.8 | 218.8 | 39.0 | 150.5 | 732.0 | 18 | |
| 3p # del | Lung Cancer | 6.4 | 8.3 | 0.0 | 2.0 | 31.0 | 15 | 0.3300 |
| | Control | 2.7 | 2.7 | 0.0 | 2.0 | 10.0 | 18 | |
| 3p # Abn. | Lung Cancer | 9.0 | 15.3 | 0.0 | 4.0 | 60.0 | 15 | 0.5136 |
| | Control | 9.5 | 11.7 | 0.0 | 6.0 | 47.0 | 18 | |
| 3p # Poly | Lung Cancer | 11.9 | 13.6 | 0.0 | 6.0 | 45.0 | 15 | 0.0319** |
| | Control | 4.5 | 7.5 | 0.0 | 2.0 | 32.0 | 18 | |
| Total 3p | Lung Cancer | 27.3 | 24.8 | 0.0 | 16.0 | 95.0 | 15 | 0.1285 |
| | Control | 16.7 | 17.8 | 2.0 | 10.5 | 69.0 | 18 | |
| Total 3p (-Abn.) | Lung Cancer | 18.3 | 14.3 | 0.0 | 11.0 | 45.0 | 15 | 0.0049** |
| | Control | 7.2 | 8.6 | 1.0 | 4.0 | 35.0 | 18 | |
| 10q # targets | Lung Cancer | 163.7 | 130.7 | 20.0 | 141.0 | 527.0 | 15 | 0.8282 |
| | Control | 225.1 | 232.8 | 36.0 | 146.0 | 767.0 | 18 | |
| 10q # del | Lung Cancer | 2.4 | 3.7 | 0.0 | 1.0 | 12.0 | 15 | 0.7779 |
| | Control | 2.6 | 3.5 | 0.0 | 1.0 | 13.0 | 18 | |
| 10q # Abn. | Lung Cancer | 2.1 | 3.3 | 0.0 | 1.0 | 12.0 | 15 | 0.6573 |
| | Control | 1.4 | 2.6 | 0.0 | 0.5 | 11.0 | 18 | |
| 10q # Poly | Lung Cancer | 13.0 | 19.8 | 0.0 | 5.0 | 67.0 | 15 | 0.1108 |
| | Control | 2.7 | 2.5 | 0.0 | 2.0 | 8.0 | 18 | |
| Total 10q | Lung Cancer | 17.5 | 25.3 | 0.0 | 5.0 | 91.0 | 15 | 0.3935 |
| | Control | 6.7 | 6.3 | 0.0 | 5.0 | 20.0 | 18 | |
| Total 10q (-Abn.) | Lung Cancer | 15.4 | 22.6 | 0.0 | 5.0 | 79.0 | 15 | 0.4126 |
| | Control | 5.3 | 4.9 | 0.0 | 4.0 | 16.0 | 18 | |
| Total 3p, 10q | Lung Cancer | 44.8 | 41.4 | 0.0 | 33.0 | 135.0 | 15 | 0.1427 |
| | Control | 23.4 | 21.4 | 3.0 | 17.0 | 80.0 | 18 | |
| Total 3p, 10q (-Abn.) | Lung Cancer | 33.7 | 34.5 | 0.0 | 25.0 | 117.0 | 15 | 0.0286** |
| | Control | 12.4 | 12.5 | 2.0 | 8.5 | 51.0 | 18 | |
| LAV # Abn. | Lung Cancer | 13.1 | 17.7 | 0.0 | 8.0 | 62.0 | 15 | 0.0103** |
| | Control | 1.5 | 2.6 | 0.0 | 0.0 | 10.0 | 17 | |
| Total 3p (-Abn.)/3p # targets | Lung Cancer | 0.1 | 0.1 | 0.0 | 0.1 | 0.4 | 15 | 0.0006** |
| | Control | 0.0 | 0.0 | 0.0 | 0.0 | 0.1 | 18 | |
| Total 3p/3p # targets | Lung Cancer | 0.2 | 0.1 | 0.0 | 0.1 | 0.5 | 15 | 0.0315** |
| | Control | 0.1 | 0.0 | 0.0 | 0.1 | 0.2 | 18 | |
| Total 10q (-Abn.)/10q # targets | Lung Cancer | 0.1 | 0.1 | 0.0 | 0.0 | 0.6 | 15 | 0.2540 |
| | Control | 0.0 | 0.0 | 0.0 | 0.0 | 0.1 | 18 | |
| Total 10q/10q # targets | Lung Cancer | 0.1 | 0.1 | 0.0 | 0.1 | 0.6 | 15 | 0.2540 |
| | Control | 0.0 | 0.0 | 0.0 | 0.0 | 0.1 | 18 | |

Table 7: Presented are the mean number of cells with genetic aberrations analyzed by the target scan as well as the mean ratio of the cells with genetic aberrations out of the total analyzed cells by the target scan, along with the standard deviation (std), minimum value (Min), median value or Maximum value (Max) for each group (lung cancer or control).
N = the number of subjects in each group.
**= indicates p value smaller than 0.05 (a significant difference between the groups);
*indicates p values between 0.05 and 0.10 (a trend towards significance).

TABLE 8
Descriptive statistics for area parameters by diagnosis

| Parameter/Diagnostic | | Mean | Std | Min | Median | Max | N | P-value |
|---|---|---|---|---|---|---|---|---|
| 3p # del | Lung Cancer | 1.9% | 1.8% | 0.0% | 1.6% | 5.9% | 14 | 0.4700 |
| | Control | 1.3% | 1.2% | 0.0% | 1.0% | 5.0% | 18 | |
| 3p # Abn. | Lung Cancer | 2.1% | 2.3% | 0.0% | 1.6% | 7.7% | 14 | 0.7040 |
| | Control | 1.7% | 1.7% | 0.0% | 0.9% | 6.5% | 18 | |
| 3p # Poly | Lung Cancer | 1.4% | 1.8% | 0.0% | 0.9% | 7.3% | 14 | 0.0771* |
| | Control | 0.8% | 1.2% | 0.0% | 0.4% | 5.3% | 18 | |
| Total 3p | Lung Cancer | 5.5% | 3.3% | 2.0% | 4.8% | 14.8% | 14 | 0.0461** |
| | Control | 3.9% | 3.1% | 1.0% | 2.9% | 12.0% | 18 | |
| Total 3p (-Abn.) | Lung Cancer | 3.4% | 2.5% | 0.0% | 3.1% | 8.6% | 14 | 0.1436 |
| | Control | 2.1% | 1.5% | 0.2% | 1.9% | 5.7% | 18 | |
| 10q # del | Lung Cancer | 1.8% | 1.3% | 0.0% | 1.5% | 4.0% | 14 | 0.0574* |
| | Control | 1.0% | 0.9% | 0.0% | 0.8% | 3.2% | 18 | |
| 10q # Abn. | Lung Cancer | 1.0% | 1.0% | 0.1% | 0.8% | 3.3% | 14 | 0.0043** |
| | Control | 0.4% | 0.7% | 0.0% | 0.2% | 2.8% | 18 | |
| 10q # Poly | Lung Cancer | 1.7% | 1.9% | 0.0% | 1.0% | 6.7% | 14 | 0.0099** |
| | Control | 0.3% | 0.4% | 0.0% | 0.2% | 1.2% | 18 | |
| Total 10q | Lung Cancer | 4.5% | 2.7% | 1.1% | 4.3% | 9.3% | 14 | 0.0013** |
| | Control | 1.7% | 1.7% | 0.0% | 1.1% | 6.8% | 18 | |
| Total 10q (-Abn.) | Lung Cancer | 3.5% | 2.2% | 0.9% | 3.6% | 8.9% | 14 | 0.0009** |
| | Control | 1.3% | 1.1% | 0.0% | 0.9% | 4.0% | 18 | |
| Total 3p, 10q | Lung Cancer | 10.0% | 4.7% | 4.2% | 9.0% | 18.6% | 14 | 0.0066** |
| | Control | 5.6% | 4.1% | 1.0% | 5.1% | 16.5% | 18 | |
| Total 3p, 10q (-Abn.) | Lung Cancer | 6.9% | 3.8% | 2.3% | 5.4% | 12.4% | 14 | 0.0041** |
| | Control | 3.5% | 2.3% | 0.8% | 2.8% | 8.9% | 18 | |
| LAV # Abn. | Lung Cancer | 10.6% | 15.7% | 1.0% | 6.0% | 62.0% | 14 | 0.0159** |
| | Control | 2.8% | 3.7% | 0.0% | 2.0% | 14.0% | 16 | |

Table 8: Presented are the mean ratio of the cells with genetic aberrations out of the total analyzed cells by the area scan along with the standard deviation (std), minimum value (Min), median value or Maximum value (Max) for each group (lung cancer or control).
N = the number of subjects in each group.
**= indicates p value smaller than 0.05 (a significant difference between the groups);
*indicates p values between 0.05 and 0.10 (a trend towards significance).

[0245] Sensitivity/Specificity Analysis

[0246] Single parameter—The following Tables 9-10 present results of sensitivity and specificity based on a single parameter. For each parameter the cutoff that yields the maximal Youden's Index (=sensitivity+specificity) is presented. For all parameters, the decision rule is to classify a subject as having lung cancer if his or her measured value is above the cutoff. Results are presented for all data and for data excluding outliers. Table 9 presents results for Target parameters (using target scan) and Table 10 for Area parameters (using area scan).

TABLE 9
Sensitivity and specificity results for target parameters (single parameter)

| | All Data | | | | Without Outliers | | | |
|---|---|---|---|---|---|---|---|---|
| | | | | Youden's | | | | Youden's |
| Parameter | Cutoff | Sensitivity | Specificity | Index | Cutoff | Sensitivity | Specificity | Index |
| 10q # Abn. | 2 | 33.3% | 83.3% | 116.7% | 2 | 23.1% | 88.2% | 111.3% |
| 10q # Poly | 6 | 40.0% | 94.4% | 134.4% | 6 | 18.2% | 94.4% | 112.6% |
| 10q # del | 5 | 20.0% | 88.9% | 108.9% | 5 | 14.3% | 94.1% | 108.4% |
| 10q # targets | 89 | 66.7% | 44.4% | 111.1% | 89 | 64.3% | 53.3% | 117.6% |
| 3p # Abn. | 47 | 6.7% | 100.0% | 106.7% | 2 | 69.2% | 37.5% | 106.7% |
| 3p # Poly | 4 | 66.7% | 77.8% | 144.4% | 4 | 58.3% | 82.4% | 140.7% |
| 3p # del | 3 | 46.7% | 83.3% | 130.0% | 3 | 20.0% | 93.8% | 113.8% |
| 3p # targets | 84 | 86.7% | 33.3% | 120.0% | 84 | 86.7% | 37.5% | 124.2% |
| LAV # Abn. | 5 | 60.0% | 94.1% | 154.1% | 5 | 50.0% | 94.1% | 144.1% |
| Total 10q | 17 | 33.3% | 94.4% | 127.8% | 17 | 9.1% | 94.4% | 103.5% |
| Total 10q (- | 16 | 33.3% | 100.0% | 133.3% | 16 | 9.1% | 100.0% | 109.1% |
| Abn.) | | | | | | | | |
| Total 10q (- | 0.06 | 46.7% | 88.9% | 135.6% | 0.06 | 38.5% | 88.9% | 127.4% |
| Abn.)/10q # | | | | | | | | |
| targets | | | | | | | | |
| Total | 0.06 | 53.3% | 83.3% | 136.7% | 0.06 | 50.0% | 83.3% | 133.3% |
| 10q/10q # | | | | | | | | |
| targets | | | | | | | | |
| Total 3p | 7 | 86.7% | 44.4% | 131.1% | 7 | 85.7% | 44.4% | 130.2% |
| Total 3p (- | 6 | 86.7% | 72.2% | 158.9% | 6 | 81.8% | 76.5% | 158.3% |
| Abn.) | | | | | | | | |
| Total 3p (- | 0.05 | 80.0% | 88.9% | 168.9% | 0.05 | 75.0% | 88.9% | 163.9% |
| Abn.)/3p # | | | | | | | | |
| targets | | | | | | | | |
| Total 3p, 10q | 38 | 40.0% | 88.9% | 128.9% | 9 | 81.8% | 38.9% | 120.7% |
| Total 3p, 10q | 15 | 60.0% | 77.8% | 137.8% | 15 | 50.0% | 77.8% | 127.8% |
| (-Abn.) | | | | | | | | |
| Total 3p/3p # | 0.06 | 86.7% | 55.6% | 142.2% | 0.06 | 83.3% | 55.6% | 138.9% |
| targets | | | | | | | | |

Table 9: Sensitivity and specificity results for target parameters (single parameter).
Cutoff = the number of target cells exhibiting a certain parameter which are required for determination of subject's clinical condition (healthy or having lung cancer). Note that when the parameter used includes an equation (e.g., a ratio of cells having a certain parameter out of the cells which can be scored using another parameter) the cutoff is the result of such equation, e.g., a number between 0 to 1.

[0247] The results demonstrate that the promising parameters are Total 3p (−Abn.) and Total 3p (−Abn)/3p # targets. Both parameters yield higher Youden's Index than LAV, although the results are not significant (p-value=0.948 and 0.487, respectively).

TABLE 10
Sensitivity and specificity results for area parameters (single parameter)

| | All Data | | | | Without Outliers | | | |
|---|---|---|---|---|---|---|---|---|
| | | | | Youden's | | | | Youden's |
| Parameter | Cutoff | Sensitivity | Specificity | Index | Cutoff | Sensitivity | Specificity | Index |
| 10q # Abn. | 0.39% | 78.6% | 77.8% | 156.3% | 0.39% | 75.0% | 82.4% | 157.4% |
| 10q # Poly | 1.22% | 50.0% | 100.0% | 150.0% | 0.59% | 54.5% | 83.3% | 137.9% |
| 10q # del | 0.90% | 71.4% | 72.2% | 143.7% | 0.90% | 71.4% | 72.2% | 143.7% |
| 3p # Abn. | 0.95% | 71.4% | 55.6% | 127.0% | 0.95% | 66.7% | 58.8% | 125.5% |
| 3p # Poly | 0.71% | 64.3% | 77.8% | 142.1% | 0.71% | 61.5% | 82.4% | 143.9% |
| 3p # del | 2.25% | 42.9% | 88.9% | 131.7% | 2.25% | 38.5% | 88.9% | 127.4% |
| LAV # Abn. | 7.00% | 50.0% | 93.8% | 143.8% | 7.00% | 46.2% | 93.8% | 139.9% |
| Total 10q | 1.18% | 92.9% | 66.7% | 159.5% | 1.18% | 92.9% | 66.7% | 159.5% |
| Total 10q (- | 2.72% | 64.3% | 88.9% | 153.2% | 1.18% | 84.6% | 66.7% | 151.3% |
| Abn.) | | | | | | | | |
| Total 3p | 2.81% | 92.9% | 50.0% | 142.9% | 2.81% | 92.3% | 52.9% | 145.2% |
| Total 3p (- | 2.54% | 64.3% | 77.8% | 142.1% | 2.54% | 58.3% | 77.8% | 136.1% |
| Abn.) | | | | | | | | |
| Total 3p, | 5.58% | 78.6% | 77.8% | 156.3% | 5.58% | 78.6% | 77.8% | 156.3% |
| 10q | | | | | | | | |
| Total 3p, | 4.12% | 78.6% | 77.8% | 156.3% | 4.12% | 78.6% | 77.8% | 156.3% |
| 10q (-Abn.) | | | | | | | | |

Table 10: Sensitivity and specificity results for area parameters (single parameter).
Cutoff = the percentage of cells exhibiting a certain parameter which are required for determination of subject's clinical condition (healthy or having lung cancer).

[0248] The results shown demonstrate that the parameter which yields the highest Youden's Index is Total 10q, though it is not significantly higher than LAV (p-value=0.660).

[0249] The following Tables present results of sensitivity and specificity based on a single parameter. For each parameter the cutoff that yields the maximal sensitivity given that specificity is fixed at least 80% is presented. For all parameters, the decision rule is to classify a subject as having lung cancer if his or her measured value is above the cutoff. Results are presented for all data and for data excluding outliers. For ease of presentation only the parameters for which the sensitivity was higher than 50% were included. Table 11, presents results for Target parameters and Table 12 for Area parameters.

TABLE 11
Sensitivity results for target parameters (single parameter),
specificity ≧80%

| | All Data | | Without Outliers | |
|---|---|---|---|---|
| Parameter | Cutoff | Sensitivity | Cutoff | Sensitivity |
| LAV # Abn. | 5 | 60.0% | | |
| Total 10q/10q # targets | 0.06 | 53.3% | | |
| Total 3p (-Abn.)/3p # targets | 0.05 | 80.0% | 0.05 | 75.0% |
| Total 3p, 10q (-Abn.) | 19 | 53.3% | | |
| 3p # Poly | | | 4 | 58.3% |

Table 11: Sensitivity results for target parameters (single parameter) when the specificity is fixed at ≧80%. Cutoff = the number of target cells exhibiting a certain parameter which are required for determination of subject's clinical condition (healthy or having lung cancer). Note that when the parameter used includes an equation (e.g., a ratio of cells having a certain parameter out of the cells which can be scored using another parameter) the cutoff is the result of such equation, e.g., a number between 0 to 1.

[0250] The results show that when specificity is fixed at 80%, using the ‘Total 3p (−Abn.)/3p # targets’ parameter, a sensitivity of 80% can be achieved.

TABLE 12
Sensitivity results for area parameters (single parameter),
specificity ≧80%

| | All Data | | Without Outliers | |
|---|---|---|---|---|
| Parameter | Cutoff | Sensitivity | Cutoff | Sensitivity |
| 10q # Abn. | 0.46% | 64.3% | 0.39% | 75.0% |
| Total 10q | 2.18% | 71.4% | 2.18% | 71.4% |
| Total 10q (-Abn.) | 2.72% | 64.3% | 2.72% | 61.5% |
| 10q # Poly | | | 0.59% | 54.5% |
| 3p # Poly | | | 0.71% | 61.5% |

Table 12: Sensitivity results for area parameters (single parameter) when the specificity is fixed on ≧80%. Cutoff = the percentage of cells exhibiting a certain parameter which are required for determination of subject's clinical condition (healthy or having lung cancer).

[0251] The results show that when specificity is fixed at 80%, using the Total 10q′ parameter, a sensitivity of 71.4% can be achieved.

[0252] The following Tables present results of sensitivity and specificity analysis based on a single parameter and using only subjects whose number of targets was above 50 in the target parameters (i.e., which included more than 50 relevant cells for target scan of the sample). For each parameter the cutoff that yields the maximal sensitivity given that specificity is fixed at least at 80% is presented. For all parameters, the decision rule is to classify a subject as having lung cancer if his or her measured value is above the cutoff. For ease of presentation only the parameters for which the sensitivity was higher than 50% and repeat the results obtained using the entire data are presented. Table 13 presents results for Target parameters (using target scan) and Table 14 for Area parameters (using area scan).

TABLE 13
Sensitivity results for target parameters (single parameter) for data
excluding number of targets <50, specificity ≧80%

| | Data Excluding # of | | | |
|---|---|---|---|---|
| | Targets <50 | | Original Data | |
| Parameter | Cutoff | Sensitivity | Cutoff | Sensitivity |
| 3p # Poly | 6 | 58.3% | | |
| LAV # Abn. | 5 | 75.0% | 5 | 60.0% |
| Total 10q (- | 0.06 | 58.3% | | |
| Abn.)/10q # | | | | |
| targets | | | | |
| Total 10q/10q # | 0.06 | 58.3% | 0.06 | 53.3% |
| targets | | | | |
| Total 3p (-Abn.) | 12 | 58.3% | | |
| Total 3p (- | 0.04 | 91.7% | 0.05 | 80.0% |
| Abn.)/3p # targets | | | | |
| Total 3p, 10q (- | 19 | 66.7% | 19 | 53.3% |
| Abn.) | | | | |

Table 13 Sensitivity results for target parameters (single parameter) for data excluding samples with number of targets <50, with a fixed specificity of ≧80%. Cutoff = the number of target cells exhibiting a certain parameter which are required for determination of subject's clinical condition (healthy or having lung cancer). Note that when the parameter used includes an equation (e.g., a ratio of cells having a certain parameter out of the cells which can be scored using another parameter) the cutoff is the result of such equation, e.g., a number between 0 to 1.

[0253] The results show that after excluding sputum samples which included less that 50 target cells/sputum sample (which resulted in the exclusion of 6 subjects from the analysis) the sensitivity of the various parameters was improved. For example, using the ‘Total 3p (−Abn.)/3p # targets’ parameter, a sensitivity of 91.7% can be achieved when the specificity is fixed at 80% (compared with 80% sensitivity when using samples including less that 50 target cells.

TABLE 14
Sensitivity results for area parameters (single parameter) for data
excluding # of targets <50, specificity ≧80%

| | Data Excluding # of Targets <50 | | Original Data | |
|---|---|---|---|---|
| Parameter | Cutoff | Sensitivity | Cutoff | Sensitivity |
| 10q # Abn. | 0.46% | 63.6% | 0.46% | 64.3% |
| 10q # Poly | 1.22% | 63.6% | | |
| 10q # del | 1.59% | 54.5% | | |
| LAV # Abn. | 7.00% | 54.5% | | |
| Total 10q | 2.18% | 81.8% | 2.18% | 71.4% |
| Total 10q (-Abn.) | 2.72% | 72.7% | 2.72% | 64.3% |
| Total 3p (-Abn.) | 3.10% | 54.5% | | |
| Total 3p, 10q | 9.25% | 54.5% | | |
| Total 3p, | 5.66% | 54.5% | | |
| 10q (-Abn.) | | | | |

Table 14: Sensitivity results for area parameters (single parameter) for data excluding samples with # of targets <50 (The same samples that were excluded in target scan based on the number of targets), when the specificity is fixed ≧80%. Cutoff = the percentage of cells exhibiting a certain parameter which are required for determination of subject's clinical condition (healthy or having lung cancer).

[0254] The results show that when excluding sputum samples which include less than 50 cells (and thus excluding 6 subjects from analysis) the sensitivity of the various parameters is improved. For example, using the ‘Total 10q’ parameter, a sensitivity of 81.8% can be achieved when the specificity is fixed at 80% (compared with 71.4% sensitivity when sputum samples with less than 50 cells are included).

[0255] Looking at all of the results obtained based on a single parameter, the most promising predictors for detection of lung cancer are ‘Total 3p (−Abn.)/3p # targets’ among the target parameters and ‘Total 10q’ among the area parameters. Removing observations with low number of targets (less than 50) in the target parameters improves the prediction of the models.

[0256] Two Parameters—The current section presents the sensitivity/specificity results based on two parameters. Since analyzing the data without outliers had little effect on the single parameters results, this analysis was performed on the entire data only. All possible pairwise combinations of parameters were analyzed in order to detect the pairs that yield the highest sensitivity and specificity sum. As described hereinabove, two types of decision rules were employed in order to select the optimal cutoffs. These were:

[0257] Decision rule 1: A subject is classified as having lung cancer if both values obtained for the two parameters are above their respective cutoffs.

[0258] Decision rule 2: A subject is classified as having lung cancer if at least one of the two parameters is above its respective cutoff.

[0259] Table 15 presents the combinations that yielded Youden's Index higher than 170% using decision rule 1 and Table 16 presents the combination that yielded Youden's Index higher than 170% using decision rule 2.

TABLE 15
Sensitivity and specificity results based on a combination of
two parameters and using decision rule 1

| | | | | | | Youden's |
|---|---|---|---|---|---|---|
| Predictor 1 | Predictor 2 | Cutoff 1 | Cutoff 2 | Sensitivity | Specificity | Index |
| Target - Total | Area - Total 10q | 6 | 1.2% | 85.7% | 88.9% | 174.6% |
| 3p (-Abn.) | Area - Total 10q | 6 | 1.2% | 85.7% | 88.9% | 174.6% |
| | (-Abn.) | | | | | |
| | Area - Total 3p, | 6 | 4.1% | 78.6% | 94.4% | 173.0% |
| | 10q (-Abn.) | | | | | |
| Target - Total | Target - Total 3p | 0.04 | 3 | 86.7% | 83.3% | 170.0% |
| 3p (-Abn.)/3p | (-Abn.) | | | | | |
| # targets | | | | | | |

Table 15: Sensitivity and specificity results based on a combination of two parameters and using decision rule 1.
Cutoff = the absolute number (for target parameters) or percentage (for area scan parameters) of cells required for determination of subject's clinical condition (healthy or having lung cancer). Cutoff (for target scan) = the number of target cells exhibiting a certain parameter which are required for determination of subject's clinical condition (healthy or having lung cancer). Note that when the parameter used includes an equation (e.g., a ratio of cells having a certain parameter out of the cells which can be scored using another parameter) the cutoff is the result of such equation, e.g., a number between 0 to 1.
Cutoff (for area scan) = the percentage of cells exhibiting a certain parameter which are required for determination of subject's clinical condition (healthy or having lung cancer).

[0260] Table 15 shows that the combinations of parameters that yields the highest Youden's Index are:

[0261] 1. Target—Total 3p (−Abn.) and Area—Total 10q;

[0262] 2. Target—Total 3p (−Abn.) and Area—Total 10q (−Abn.).

[0263] The difference in the prediction obtained from the (single) LAV parameter (using Target statistics) and the above two combinations is not statistically significant (p-value=0.326).

TABLE 16
Sensitivity and specificity results based on a combination of
two parameters and using decision rule 2

| | | | | | | Youden's |
|---|---|---|---|---|---|---|
| Predictor 1 | Predictor 2 | Cutoff 1 | Cutoff 2 | Sensitivity | Specificity | Index |
| Area - 10q # | Area - 10q # Abn. | 1.22% | 0.7% | 85.7% | 88.9% | 174.6% |
| Poly | | | | | | |
| Target - | Area - 10q # Abn. | 0.05 | 0.8% | 92.9% | 83.3% | 176.2% |
| Total 3p (- | Area - 10q # Poly | 0.06 | 1.2% | 78.6% | 94.4% | 173.0% |
| Abn.)/3p # | Area - 10q # del | 0.05 | 2.8% | 85.7% | 88.9% | 174.6% |
| targets | Area - 3p # Abn. | 0.05 | 6.5% | 85.7% | 88.9% | 174.6% |
| | Area - Total 10q | 0.05 | 4.5% | 85.7% | 88.9% | 174.6% |
| | Area - Total 10q (- | 0.05 | 3.4% | 85.7% | 88.9% | 174.6% |
| | Abn.) | | | | | |

Table 16: Sensitivity and specificity results based on a combination of two parameters and using decision rule 2.
Cutoff (for target scan) = the number of target cells exhibiting a certain parameter which are required for determination of subject's clinical condition (healthy or having lung cancer). Note that when the parameter used includes an equation (e.g., a ratio of cells having a certain parameter out of the cells which can be scored using another parameter) the cutoff is the result of such equation, e.g., a number between 0 to 1.
Cutoff (for area scan) = the percentage of cells exhibiting a certain parameter which are required for determination of subject's clinical condition (healthy or having lung cancer).

[0264] Table 16 demonstrates that the combination of parameters that yields the higher Youden's Index is ‘Target—Total 3p (−Abn.)/3p # targets and Area—10q # Abn’.

[0265] The difference in the prediction obtained from the (single) LAV parameter (using Target statistics) and the above three combinations is not statistically significant (p-value=0.326).

[0266] The following Tables present results of the two parameters analysis repeated for cutoffs that yield the maximal sensitivity given that specificity is fixed at least at 80%-once for the entire original data and once using only subjects in which the number of targets (relevant cells in the sample) was above 50 in the target parameters. Table 17 presents the combinations that yielded sensitivity higher than 85% using decision rule 1 and Table 18 presents the combination that yielded sensitivity higher than 85% using decision rule 2

TABLE 17
Sensitivity results based on a combination of two parameters and
using decision rule 1, specificity ≧80%

| | | Data Excluding | | | | | |
|---|---|---|---|---|---|---|---|
| | | # of Targets < 50 | | | Original Data | | |
| Predictor 1 | Predictor 2 | Cutoff 1 | Cutoff 2 | Sensitivity | Cutoff 1 | Cutoff 2 | Sensitivity |
| Area - Total 3p, | Area - 10q # Abn. | 4% | 0.16% | 90.9% | | | |
| 10q (-Abn.) | | | | | | | |
| Target - 10q # | Area - Total 10q | 1 | 1.33% | 90.9% | | | |
| Poly | Area - Total 10q | 1 | 1.20% | 90.9% | | | |
| | (-Abn.) | | | | | | |
| | Area - Total 3p, | 1 | 4.12% | 90.9% | | | |
| | 10q (-Abn.) | | | | | | |
| Target - 10q # | Area - Total 3p, | 58 | 4.12% | 90.9% | | | |
| targets | 10q (-Abn.) | | | | | | |
| Target - 3p # | Area - Total 10q | 3 | 1.18% | 90.9% | | | |
| Poly | Area - Total 10q | 3 | 1.15% | 90.9% | | | |
| | (-Abn.) | | | | | | |
| | Area - Total 3p, | 3 | 2.25% | 90.9% | | | |
| | 10q (-Abn.) | | | | | | |
| Target - 3p # | Area - Total 10q | 117 | 1.15% | 90.9% | | | |
| targets | (-Abn.) | | | | | | |
| | Area - Total 3p, | 84 | 4.12% | 90.9% | | | |
| | 10q (-Abn.) | | | | | | |
| Target - Total | Area - Total 3p, | 1 | 4.12% | 90.9% | | | |
| 10q | 10q (-Abn.) | | | | | | |
| Target - Total | Area - Total 3p, | 1 | 4.12% | 90.9% | | | |
| 10q (-Abn.) | 10q (-Abn.) | | | | | | |
| Target - Total | Area - Total 3p, | 0.01 | 4.12% | 90.9% | | | |
| 10q (-Abn.)/10q | 10q (-Abn.) | | | | | | |
| # targets | | | | | | | |
| Target - Total | Area - Total 3p, | 0.02 | 4.12% | 90.9% | | | |
| 10q/10q # | 10q (-Abn.) | | | | | | |
| targets | | | | | | | |
| Target - Total | Area - Total 3p, | 7 | 4.12% | 90.9% | | | |
| 3p | 10q (-Abn.) | | | | | | |
| Target - Total | Area - Total 10q | 6 | 1.18% | 100.0% | 6 | 1.18% | 85.7% |
| 3p (-Abn.) | Area - Total 10q | 6 | 1.15% | 100.0% | 6 | 1.18% | 85.7% |
| | (-Abn.) | | | | | | |
| | Area - Total 3p, | 6 | 4.12% | 90.9% | | | |
| | 10q (-Abn.) | | | | | | |
| Target - Total | Area - 10q # Abn. | 0.04 | 0.00% | 90.9% | 0.04 | 0.00% | 85.7% |
| 3p (-Abn.)/3p # | Area - Total 10q | 0.04 | 1.18% | 90.9% | 0.04 | 1.06% | 85.7% |
| targets | Area - Total 10q | 0.04 | 1.15% | 90.9% | 0.04 | 0.85% | 85.7% |
| | (-Abn.) | | | | | | |
| | Area - Total 3p | 0.04 | 1.60% | 90.9% | | | |
| | Area - Total 3p, | 0.04 | 3.75% | 90.9% | | | |
| | 10q | | | | | | |
| | Target - 10q # | 0.04 | 58 | 91.7% | | | |
| | targets | | | | | | |
| | Target - 3p # | 0.04 | 0 | 91.7% | | | |
| | Abn. | | | | | | |
| | Target - 3p # | 0.04 | 84 | 91.7% | | | |
| | targets | | | | | | |
| | Target - Total 10q | 0.04 | 0 | 91.7% | | | |
| | Target - Total 10q | 0.04 | 0 | 91.7% | | | |
| | (-Abn.) | | | | | | |
| | Target - Total 10q | 0.04 | 0 | 91.7% | | | |
| | (-Abn.)/10q # | | | | | | |
| | targets | | | | | | |
| | Target - Total | 0.04 | 0 | 91.7% | | | |
| | 10q/10q # targets | | | | | | |
| | Target - Total 3p | 0.04 | 7 | 91.7% | | | |
| | Target - Total 3p | 0.02 | 6 | 100.0% | 0.04 | 3 | 86.7% |
| | (-Abn.) | | | | | | |
| Target - Total | Target - Total 3p | 9 | 0.357 | 91.7% | | | |
| 3p, 10q | (-Abn.)/3p # | | | | | | |
| | targets | | | | | | |
| Target - Total | Area - Total 3p, | 8 | 4.12% | 90.9% | | | |
| 3p, 10q (-Abn.) | 10q (-Abn.) | | | | | | |
| | Target - Total 3p | 6 | 0.357 | 91.7% | | | |
| | (-Abn.)/3p # | | | | | | |
| | targets | | | | | | |
| Target - Total | Target - Total 3p | 0.06 | 6 | 91.7% | | | |
| 3p/3p # targets | (-Abn.) | | | | | | |
| | Target - Total 3p | 0.06 | 0.357 | 91.7% | 0.06 | 0.357 | 86.7% |
| | (-Abn.)/3p # | | | | | | |
| | targets | | | | | | |

Table 17: Sensitivity results based on a combination of two parameters and using decision rule 1, specificity ≧80%.
Cutoff (for target scan) = the number of target cells exhibiting a certain parameter which are required for determination of subject's clinical condition (healthy or having lung cancer). Note that when the parameter used includes an equation (e.g., a ratio of cells having a certain parameter out of the cells which can be scored using another parameter) the cutoff is the result of such equation, e.g., a number between 0 to 1.
Cutoff (for area scan) = the percentage of cells exhibiting a certain parameter which are required for determination of subject's clinical condition (healthy or having lung cancer).

[0267] Table 17 demonstrates that excluding samples which include less than 50 cells (resulted in exclusion of 6 samples) results in higher sensitivity. The highest sensitivity (100%, when excluding observations with less than 50 targets) was obtained when combining ‘Target—Total 3p (−Abn.)/3p # targets’ with ‘Target—Total 3p (−Abn.)’.

TABLE 18
Senstivity results based on a combination of two parameters and
using decision rule 2, specificity ≧80%

| | | Data Excluding | | | | | |
|---|---|---|---|---|---|---|---|
| | | # of Targets < 50 | | | Original Data | | |
| Predictor 1 | Predictor 2 | Cutoff 1 | Cutoff 2 | Sensitivity | Cutoff 1 | Cutoff 2 | Sensitivity |
| Area - 10q # | Area - 10q # Abn. | 0.01 | 0.74% | 90.9% | 0.01 | 0.74% | 85.7% |
| Poly | | | | | | | |
| Area - Total | Area - 10q # Poly | 0.02 | 1.22% | 90.9% | | | |
| 10q | | | | | | | |
| Area - Total | Area - 10q # Abn. | 0.03 | 0.53% | 90.9% | 0.03 | 0.53% | 85.7% |
| 3p (-Abn.) | Area - Total 10q | 0.03 | 2.18% | 90.9% | | | |
| Target - 3p # | Area - Total 10q (-Abn.) | 4 | 3.23% | 90.9% | | | |
| del | | | | | | | |
| Target - Total | Area - 10q # Poly | 0.07 | 0.59% | 90.9% | | | |
| 10q (- | | | | | | | |
| Abn.)/10q # | | | | | | | |
| targets | | | | | | | |
| Target - Total | Area - 10q # Abn. | 0.05 | 0.81% | 90.9% | 0.05 | 0.77% | 92.9% |
| 3p (-Abn.)/3p | Area - 10q # del | 0.04 | 2.77% | 100.0% | 0.05 | 2.77% | 85.7% |
| # targets | Area - 3p # Abn. | 0.04 | 6.54% | 100.0% | 0.05 | 6.54% | 85.7% |
| | Area - 3p # Poly | 0.04 | 7.33% | 90.9% | | | |
| | Area - 3p # del | 0.04 | 5.93% | 90.9% | | | |
| | Area - Total 10q | 0.04 | 4.48% | 100.0% | 0.05 | 4.48% | 85.7% |
| | Area - Total 10q (-Abn.) | 0.04 | 3.35% | 100.0% | 0.05 | 3.35% | 85.7% |
| | Area - Total 3p | 0.04 | 14.83% | 90.9% | | | |
| | Area - Total 3p (-Abn.) | 0.04 | 8.60% | 90.9% | | | |
| | Area - Total 3p, 10q | 0.04 | 18.62% | 90.9% | | | |
| | Area - Total 3p, 10q (-Abn.) | 0.04 | 12.36% | 90.9% | | | |
| | Target - 10q # Abn. | 0.04 | 12 | 91.7% | | | |
| | Target - 10q # Poly | 0.04 | 67 | 91.7% | | | |
| | Target - 10q # del | 0.04 | 13 | 91.7% | | | |
| | Target - 10q # targets | 0.04 | 767 | 91.7% | | | |
| | Target - 3p # Abn. | 0.04 | 60 | 91.7% | | | |
| | Target - 3p # Poly | 0.04 | 45 | 91.7% | | | |
| | Target - 3p # del | 0.04 | 31 | 91.7% | | | |
| | Target - 3p # targets | 0.04 | 732 | 91.7% | | | |
| | Target - Total 10q | 0.04 | 91 | 91.7% | | | |
| | Target - Total 10q (-Abn.) | 0.04 | 79 | 91.7% | | | |
| | Target - Total 10q (- | 0.04 | 0.574 | 91.7% | | | |
| | Abn.)/10q # targets | | | | | | |
| | Target - Total 10q/10q # | 0.04 | 0.574 | 91.7% | | | |
| | targets | | | | | | |
| | Target - Total 3p | 0.04 | 95 | 91.7% | | | |
| | Target - Total 3p (-Abn.) | 0.04 | 45 | 91.7% | | | |
| Target - Total | Target - Total 3p (-Abn.)/3p | 135 | 0.357 | 91.7% | | | |
| 3p, 10q | # targets | | | | | | |
| Target - Total | Target - Total 3p (-Abn.)/3p | 117 | 0.357 | 91.7% | | | |
| 3p, 10q (- | # targets | | | | | | |
| Abn.) | | | | | | | |
| Target - Total | Target - Total 3p (-Abn.)/3p | 0.46 | 0.357 | 91.7% | | | |
| 3p/3p # | # targets | | | | | | |
| targets | | | | | | | |

Table 18: Sensitivity results based on a combination of two parameters and using decision rule 2, specificity ≧80%
Cutoff (for target scan) = the number of target cells exhibiting a certain parameter which are required for determination of subject's clinical condition (healthy or having lung cancer). Note that when the parameter used includes an equation (e.g., a ratio of cells having a certain parameter out of the cells which can be scored using another parameter) the cutoff is the result of such equation, e.g., a number between 0 to 1.
Cutoff (for area scan) = the percentage of cells exhibiting a certain parameter which are required for determination of subject's clinical condition (healthy or having lung cancer).

[0268] Table 18 shows that excluding samples which include less than 50 target cells (which results in exclusion of 6 samples) generates better sensitivity results. The highest sensitivity (100%, when excluding observations with less than 50 targets) was obtained when combining ‘Target—Total 3p (−Abn.)/3p # targets’ with one of the following Area parameters: ‘10q # del’, ‘3p # Abn.’, ‘Total 10q’ or ‘Total 10q (−Abn.)’.

[0269] Looking at all of the results obtained based on a combination of two parameters, the most promising pair of predictors for detection of lung cancer is a combination of ‘Total 3p (−Abn.)/3p # targets’ among the target parameters and with another parameter. Once again, removing observations with low number of targets in the target parameters improves the prediction of the models. As expected, using a combination of two parameters generates better results than using only one parameter.

[0270] Power Analysis—The following Table presents the results of the power analysis.

TABLE 19
Number of subjects required to achieve at least 80%

| | Constant | | | | |
|---|---|---|---|---|---|
| True Sensitivity | 70% | 75% | 80% | 85% | 90% |
| 80% | 155 | 553 | | | |
| 85% | 61 | 132 | 466 | | |
| 90% | 31 | 54 | 107 | 356 | |
| 95% | 22 | 27 | 41 | 75 | 231 |

Table 19.

Table 19 shows that if, for example, the assumption is that the “true sensitivity” of the procedure is 90%, then a sample of 54 diseased subjects will provide 80% power to test the hypothesis that the sensitivity obtained in the sample is higher than 75%. To test the hypothesis that the sensitivity obtained is higher than 80%, a sample of 107 diseased subjects would be required in order to achieve 80% power.

[0271] List of Outliers—The following Table presents a listing of all the outliers that were excluded from the ‘Without Outliers’ analysis. A value was considered to be an outlier if it was higher than 1.5 times the inter-quartile range above the 3^{rd} quartile.

TABLE 20
Listing of outliers by parameter

| Statistics | Diagnostic | Case # | Predictor | Value |
|---|---|---|---|---|
| Target | Control | IS-103 | 3p # Abn. | 29 |
| Target | Control | IS-12 | 10q # Abn. | 11 |
| Target | Control | IS-24 | 10q # targets | 711 |
| Target | Control | IS-24 | 3p # Abn. | 47 |
| Target | Control | IS-24 | 3p # targets | 732 |
| Target | Control | IS-41 | 10q # targets | 767 |
| Target | Control | IS-41 | 3p # Poly | 32 |
| Target | Control | IS-41 | 3p # targets | 720 |
| Target | Control | IS-7 | 10q # del | 13 |
| Target | Control | IS-77 | 10q # targets | 575 |
| Target | Lung Cancer | IS-1 | 10q # Poly | 20 |
| Target | Lung Cancer | IS-1 | 3p # del | 31 |
| Target | Lung Cancer | IS-1 | LAV # Abn. | 33 |
| Target | Lung Cancer | IS-1 | Total 10q (-Abn.) | 29 |
| Target | Lung Cancer | IS-1 | Total 3p, 10q (-Abn.) | 64 |
| Target | Lung Cancer | IS-14 | 10q # Poly | 22 |
| Target | Lung Cancer | IS-14 | 3p # Abn. | 24 |
| Target | Lung Cancer | IS-14 | Total 10q (-Abn.) | 26 |
| Target | Lung Cancer | IS-150 | Total 3p (-Abn.)/3p | 0.2857143 |
| | | | # targets | |
| Target | Lung Cancer | IS-150 | Total 3p/3p # targets | 0.2857143 |
| Target | Lung Cancer | IS-2 | 3p # del | 16 |
| Target | Lung Cancer | IS-2 | Total 3p (-Abn.)/3p | 0.1811024 |
| | | | # targets | |
| Target | Lung Cancer | IS-43 | 3p # Abn. | 60 |
| Target | Lung Cancer | IS-43 | 3p # Poly | 35 |
| Target | Lung Cancer | IS-43 | Total 3p | 95 |
| Target | Lung Cancer | IS-43 | Total 3p, 10q | 98 |
| Target | Lung Cancer | IS-43 | Total 3p/3p # targets | 0.3518519 |
| Target | Lung Cancer | IS-81 | 10q # Abn. | 12 |
| Target | Lung Cancer | IS-81 | 10q # Poly | 67 |
| Target | Lung Cancer | IS-81 | 10q # del | 12 |
| Target | Lung Cancer | IS-81 | 10q # targets | 527 |
| Target | Lung Cancer | IS-81 | 3p # Poly | 27 |
| Target | Lung Cancer | IS-81 | LAV # Abn. | 36 |
| Target | Lung Cancer | IS-81 | Total 10q | 91 |
| Target | Lung Cancer | IS-81 | Total 10q (-Abn.) | 79 |
| Target | Lung Cancer | IS-81 | Total 3p, 10q | 135 |
| Target | Lung Cancer | IS-81 | Total 3p, 10q (-Abn.) | 117 |
| Target | Lung Cancer | IS-82 | 10q # Poly | 49 |
| Target | Lung Cancer | IS-82 | 3p # Poly | 45 |
| Target | Lung Cancer | IS-82 | LAV # Abn. | 62 |
| Target | Lung Cancer | IS-82 | Total 10q | 50 |
| Target | Lung Cancer | IS-82 | Total 10q (-Abn.) | 50 |
| Target | Lung Cancer | IS-82 | Total 10q (-Abn.)/10q | 0.5747126 |
| | | | # targets | |
| Target | Lung Cancer | IS-82 | Total 10q/10q | 0.5747126 |
| | | | # targets | |
| Target | Lung Cancer | IS-82 | Total 3p (-Abn.)/3p | 0.4455446 |
| | | | # targets | |
| Target | Lung Cancer | IS-82 | Total 3p, 10q | 96 |
| Target | Lung Cancer | IS-82 | Total 3p, 10q (-Abn.) | 95 |
| Target | Lung Cancer | IS-82 | Total 3p/3p # targets | 0.4554455 |
| Area | Control | IS-12 | 3p # Abn. | 0.0654 |
| Area | Control | IS-12 | Total 3p | 0.1203 |
| Area | Control | IS-41 | 3p # Poly | 0.0526 |
| Area | Control | IS-8 | 10q # Abn. | 0.028 |
| Area | Lung Cancer | IS-1 | 10q # Abn. | 0.0321 |
| Area | Lung Cancer | IS-10 | 10q # Abn. | 0.0333 |
| Area | Lung Cancer | IS-14 | 3p # Abn. | 0.0623 |
| Area | Lung Cancer | IS-14 | 3p # del | 0.0593 |
| Area | Lung Cancer | IS-14 | Total 3p | 0.1483 |
| Area | Lung Cancer | IS-14 | Total 3p (-Abn.) | 0.086 |
| Area | Lung Cancer | IS-155 | 3p # Abn. | 0.0773 |
| Area | Lung Cancer | IS-42 | 10q # Poly | 0.0335 |
| Area | Lung Cancer | IS-81 | 10q # Poly | 0.0667 |
| Area | Lung Cancer | IS-81 | Total 10q (-Abn.) | 0.0892 |
| Area | Lung Cancer | IS-82 | 10q # Poly | 0.041 |
| Area | Lung Cancer | IS-82 | 3p # Poly | 0.0733 |
| Area | Lung Cancer | IS-82 | LAV # Abn. | 0.62 |
| Area | Lung Cancer | IS-82 | Total 3p (-Abn.) | 0.0733 |

Table 21.

### Example 4

### Detection of Lung Cancer in Induced Sputum by Combined Analysis of Morphology and Fish

[0272] Evaluation of induced sputum samples from 71 subjects: 14 patients diagnosed with advanced stage (stage III-IV) lung cancer, 15 patients diagnosed with early stage lung cancer (stage I), 32 high-risk volunteers (heavy smokers and 10 healthy non-smoking controls. The local ethical review committee approved the study and informed consent was obtained from all patients.

[0273] Materials and Methods

[0274] Sputum production and processing—Induced sputum production was performed by saline inhalation with a nebulizer. In the cancer patients who were resected or were referred to bronchoscopy, induced sputum samples were collected before the invasive procedure. Following inhalation, patients and controls were instructed to cough into a container that was filled with Sacommano's fixative (90% alcohol, 5% acetic acid and 5% polyethylene glycol). Sputum samples were centrifuged and/or filtered through gauze and the sediment was used to prepare at least 10 cytospins (cytocentrifugation samples) on positively charged glass slides using a SHANDON-Cytosine 2 cytocentrifuge (Pittsburgh, Pa.). Slides were fixed in 95% ethanol.

[0275] Morphological staining—Slides were stained with Papanicolaou stain according to standard protocols. The slides containing the stained cells were subject to morphological analysis in a Bright field mode using the Bio View Duet.

[0276] Destaining and pretreatment—Following morphological evaluation of the stained cells the slides were immersed in Xylene until the removal of the coverslip. The slides were then washed in an Ethanol series of 100%, 95% and 70% and immersed for 10 minutes in 1.5% Acid Alcohol at room temperature. Slides were then washed in running water and immersed for 60 minutes in 2×SSC at 37° C.

[0277] Prior to FISH, slides were digested in 10 mM HCl/0.05% digestion enzyme (BioView Ltd. Rehovot, Israel) for approximately 18 minutes at 37° C. Then the slides were washed for 5 minutes in 1×PBS, fixed for 5 minutes in 1% formaldehyde/PBS, washed once for 5 minutes in 1×PBS and dehydrated in an ice-cold ethanol series (70, 80, 100%).

[0278] FISH—A 3-color FISH assay was performed using directly labeled BAC probes for 3p22.1 (GenBank Accession No. AC104186), 10q22-23 (GenBank Accession No. AC068139) combined with commercial centromeric probes for chromosome 10 (CEP 10) (Vysis Downers grove, Ill.). It should be noted that FISH can be performed using multiple FISH probes, each corresponding to a distinct color, e.g., 2-color FISH probes, 3-color FISH probes, 4-colors FISH probes and more. A further description of the BAC probes is provided in Example 1, above.

[0279] The BAC probe located at 10q22.2-q23.1 was labeled with Spectrum Red dUTP (Vysis, Downers Grove, Ill.) (5). The chromosomal location of the clone was confirmed by FISH on a normal metaphase spread. The BAC clone for 3p22.1 was labeled with Spectrum Green dUTP (Vysis, Downers Grove, Ill.) according to the manufacturer's directions. Localization of the BAC clone on chromosome 3 was confirmed by using normal metaphase FISH. The centromeric 10 probe (CEP 10), available from Vysis (Downers Grove, Ill.) is fluorescently-labeled with Spectrum Aqua. One hundred nanograms of each labeled probe (i.e., of the 10q22.2-q23.1 and 3p22.1 BAC probes was mixed with an equal quantity of human Cot-1 DNA (Life Technologies, Rockville, Md.) in 10 μl of LSI hybridization buffer (Vysis) and mounted on a slide together with 1 μl of CEP 10. Hybridization and post-washing were performed as described previously (5). Counterstaining of nuclei was performed with DAPI and evaluated under a fluorescent microscope equipped with the appropriate filter combinations.

[0280] Classification—Slides were screened and classified as follows: First, slides were scanned under Bright field mode for morphology analysis (Morphology scan). During this scan, images and coordinates were captured for each and every cell on the slide. Based on the morphology information retrieved during the bright-field scan, cells of interest which are relevant for a further cytogenetical analysis (e.g., FISH) were subjected into a sub-group called “target cells”. This sub-group contains cells with abnormal morphology and/or cells which originate in the lower airways or the lungs (see examples of relevant cells in FIGS. 7A-I). It should be noted that not all cells present in the sputum sample are relevant for cytogenetical (FISH) analysis. Cells excluded from the genetic analysis are those not involved in the molecular field cancerization effect associated with lung cancer such as squamous epithelial cells (FIG. 7J) and blood cells. In the next step, the same “target cells” identified in the morphology scan were analyzed for their FISH pattern. Slides were scanned under fluorescent filters (dark field imaging) and the Duet system (Bio View, Rehovot, Israel) relocate the pre-selected “target cells” and classify them according to a seven tiered scoring system as follows: “Normal cells”—two copies of each locus-specific probe (i.e., 10q22.2-q23.1 and 3p22.1) and two copies of CEP 10 (2 green, 2 red and 2 aqua signals); “deletion 3p”—one copy of the 3p locus-specific probe (i.e., 3p22.1) is missing (1 green, 2 red and 2 aqua signals); “deletion 10q”—one copy of the 10q locus-specific probe (i.e., 10q22.2-q23.1) is missing (2 green, 1 red and 2 aqua signals); “10q-3p deletion”—one copy of the 3p locus-specific probe (i.e., 3p22.1) and one copy of the 10q locus-specific probe (i.e., 10q22.2-q23.1) is missing (1 green, 1 red and 2 aqua signals); “3p Polysomy”—more than two copies of the 3p locus-specific probe (i.e., 3p22.1) (>2 green, 2 red and 2 aqua signals); “10q Polysomy”—more than two copies of the 10q locus-specific probe (i.e., 10q22.2-q23.1) (2 green, >2 red and 2 aqua signals); and “Polysomy”—more than two copies of both 3p and 10q locus-specific probes (i.e., 10q22.2-q23.1 and 3p22.1) and CEP 10 (>2 green, >2 red and >2 aqua signals).

### Experimental and Statistics Results

[0281] Identification of genetic aberrations in relevant target cells of a sputum sample—FIGS. 8A-F provide examples of the combined staining methods (a morphological and cytogenetical staining methods) for diagnosing lung cancer. A respiratory epithelial cell stained with Papanicolaou's stain (FIG. 8A) was marked as a “target cell” being suitable for a further cytogenetic analysis. Following destaining of the morphological stain (Papanicolaou's stain in this case), the slide was subject to FISH analysis using the 3-color FISH probes (i.e., the 10q22.2-q23.1 and 3p22.1 BAC probes and CEP10) and the marked target cell was re-scanned for FISH signals. As shown in FIG. 8B, the respiratory epithelial cell exhibits two green signals corresponding to two copies of the 3p22.1 locus, two aqua signals corresponding to two copies of the chromosome 10 centromere region and one red signal corresponding to one copy of the 10q22.2-q23.1 locus, thus indicating a deletion of 10q22-23 in the analyzed cell.

[0282] An additional respiratory epithelial cell stained with Papanicolaou stain (FIG. 8C) and subsequently with the 3-color FISH probes was found to exhibit four green signals corresponding to four copies of the 3p22.1 locus, three aqua signals corresponding to three copies of the chromosome 10 centromere region and three red signals corresponding to three copy of the 10q22.2-q23.1 locus (FIG. 8D), thus indicating a polysomy in the analyzed cell.

[0283] A metaplastic cell stained with Papanicolaou stain (FIG. 8E) and subsequently with the 3-color FISH probes was found to exhibit three green signals corresponding to three copies of the 3p22.1 locus, two aqua signals corresponding to two copies of the chromosome 10 centromere region and two red signals corresponding to two copy of the 10q22.2-q23.1 locus (FIG. 8F), thus indicating 3p Polysomy in the analyzed cell.

[0284] Evaluation of sensitivity and specificity of the method of diagnosing lung cancer in sputum samples according to a scoring index—This study evaluated the sensitivity and specificity of the combined staining method according to some embodiments of the invention in diagnosing lung cancer using sputum samples (i.e., a non-invasive method). Induced sputum samples from 71 individuals were included in the study: 14 patients diagnosed with advanced stage (stage III-IV) lung cancer, 15 patients diagnosed with early stage lung cancer (stage I), 32 high-risk volunteers (heavy smokers) and 10 healthy, non-smoking, controls.

[0285] A scoring index was designed in order to represent the level of genetic abnormalities found in the sputum samples. This index reflects the percentage of FISH aberrant cells out of the “target cells” identified in the sample and the cutoff for a positive result depends on the total number of “target cells” that were scored.

[0286] Based on this index the cutoff for a positive result was as follows:

[0287] For samples which contain less than 200 target cells—the percentage of FISH aberrant cells is >10 (more than 10%).

[0288] For samples which contain between 200 and 1000 target cells—% of FISH aberrant cells >7.5.

[0289] For samples contain more than 1000 target cells—% of FISH aberrant cells >5.

[0290] The overall results are plotted in FIG. 9. It can be seen that the majority of lung cancer patients were diagnosed with positive result while the majority of smokers and non-smoking controls exhibit negative result.

[0291] The average scores (representing the percentage of genetic abnormalities found within the target cells) for the various groups tested are described in Table 22, below.

TABLE 22
Average scores: percentages of genetic abnormalities found in target cells

| Patient Group | No. | Average score (%) |
|---|---|---|
| Advanced lung cancer | 14 | 15.29 |
| Early stage Lung cancer | 15 | 11.59 |
| Risk population (Smokers) | 32 | 5.4 |
| Healthy non-smoking controls | 10 | 5.9 |

Table 22.

[0292] The difference in the level of genetic abnormalities between lung cancer patients (including all stages) and control (smokers and non-smokers) was found to be statistically significant (p=0.008).

[0293] The sensitivity and specificity of the test is described in Table 23, below.

TABLE 23
Combined targeted analysis using FISH probes specific to 3p22.1,
10q22-23, 10 centromere

| | Lung cancer | Healthy | Sensitivity | Specificity |
|---|---|---|---|---|
| Positive result | 27 | 8 | 93.1% | 80.95% |
| Negative result | 2 | 34 | | |

Table 23.

[0294] The combined analysis method was able to detect 27/29 lung cancer patients (93.1% sensitivity) and 34/42 healthy control subjects (80.95% specificity).

[0295] Analysis and Discussion

[0296] Altogether, the present inventors provide for the first time, a non-invasive, highly accurate method of diagnosing lung cancer and/or metastatic lung cancer in sputum samples.

[0297] There are two main types of lung cancer: small cell lung cancer and non-small cell lung cancer (NSCLC). Small cell lung cancer makes up about 20% of all lung cancer cases. Non-small cell lung cancer (NSCLC) is the most common type of lung cancer. It usually grows and spreads more slowly than small cell lung cancer. There are three forms of NSCLC: (1) Adenocarcinomas, which are often found in an outer area of the lung; (2) Squamous cell carcinomas, which are usually found in the center of the lung by an air tube (bronchus); and (3) Large cell carcinomas, which may occur in any part of the lung. The large cell carcinomas tend to grow and spread faster than the other two types.

[0298] Metastatic lung cancer is the spread of cancer cells from the site of origin (e.g., a distal tissue) to the lung (e.g., via the blood stream). Common tumors that metastasize to the lungs include breast cancer, colon cancer, prostate cancer, sarcoma, bladder cancer, neuroblastoma, and Wilm's tumor. However, almost any cancer has the capacity to spread to the lungs.

[0299] Early detection of lung cancer is mandatory to reduce its extremely high mortality rate. Since sputum collection is a non-invasive test, it would be most advantageous for early cancer detection. Using sputum biomarkers could help identifying patients at a high risk for cancer-related events, such as development of pre-malignant lesions or early cancers so that these patients may be placed under intense surveillance either by fluorescent bronchoscopic examination or regular helical CT scan of lungs to detect peripheral carcinomas. Additionally this is an ideal population to benefit from chemopreventive agents and smoking cessation counseling.

### Example 5

### Fish Probes Suitable for Detection of Genetic Abnormalities in Human Chromosomes 3p22.1 and 10q22-23

TABLE 24
FISH probes on 3p22.1

| First | Last | | | |
|---|---|---|---|---|
| nucleotide | nucleotide | | Cytological | |
| coordinate | coordinate | Symbol | band/locus | Description |
| 39346219 | 39351077 | CCR8 | 3p22 | chemokine (C-C motif) receptor 8 |
| 39351380 | 39352471 | hnRNPA1p | 3p22.1 | heterogeneous nuclear |
| | | | | ribonucleoprotein A1 pseudogene |
| 39375040 | 39376736 | LOC645715 | 3p22.1 | similar to eukaryotic translation |
| | | | | elongation factor 1 alpha 2 |
| 39393013 | 39397635 | LOC100131456 | 3p22.1 | hypothetical protein LOC100131456 |
| 39399819 | 39413823 | SLC25A38 | 3p22.1 | solute carrier family 25, member 38 |
| 39422917 | 39429037 | RPSA | 3p22.2 | ribosomal protein SA |
| 39424886 | 39425034 | SNORA6 | 3p22.2 | small nucleolar RNA, H/ACA box 6 |
| 39427549 | 39427702 | SNORA62 | 3p22 | small nucleolar RNA, H/ACA box 62 |
| 39484074 | 39542863 | MOBP | 3p22.1 | myelin-associated oligodendrocyte |
| | | | | basic protein |
| 39660133 | 39661200 | LOC100132681 | 3p22.1 | hypothetical LOC100132681 |
| 39826307 | 40276816 | MYRIP | 3p22.1 | myosin VIIA and Rab interacting |
| | | | | protein |
| 40326177 | 40328919 | EIF1B | 3p22.1 | eukaryotic translation initiation factor |
| | | | | 1B |
| 40339285 | 40344043 | LOC100129750 | 3p22.1 | hypothetical LOC100129750 |
| 40403694 | 40445114 | ENTPD3 | 3p21.3 | ectonucleoside triphosphate |
| | | | | diphosphohydrolase 3 |
| 40473805 | 40478863 | RPL14 | 3p22-p21.2 | ribosomal protein L14 |
| 40493641 | 40504881 | ZNF619 | 3p22.1 | zinc finger protein 619 |
| 40522534 | 40534042 | ZNF620 | 3p22.1 | zinc finger protein 620 |
| 40541380 | 40556047 | ZNF621 | 3p22.1 | zinc finger protein 621 |
| 40612702 | 40613989 | LOC651628 | 3p22.1 | similar to Elongation factor 1-gamma |
| | | | | (EF-1-gamma) (eEF-1B gamma) |
| 40714727 | 40727054 | LOC729505 | 3p22.1 | hypothetical protein LOC729505 |
| 40777894 | 40778476 | RPS27P4 | 3p22.1 | ribosomal protein S27 pseudogene 4 |
| 41205525 | 41205737 | MRPS31P1 | 3p21.33 | mitochondrial ribosomal protein S31 |
| | | | | pseudogene 1 |
| 41215946 | 41256943 | CTNNB1 | 3p21 | catenin (cadherin-associated protein), |
| | | | | beta 1, 88 kDa |
| 41263094 | 41978664 | ULK4 | 3p22.1 | unc-51-like kinase 4 (C. elegans) |
| 41971941 | 41972294 | LOC729032 | 3p22.1 | similar to ribosomal protein L36 |
| 41990962 | 41994659 | LOC645874 | 3p22.1 | hypothetical LOC645874 |
| 42107750 | 42242272 | TRAK1 | 3p25.3-p24.1 | trafficking protein, kinesin binding 1 |
| 42162142 | 42162867 | LOC100129336 | 3p22.1 | hypothetical LOC100129336 |
| 42274322 | 42281399 | CCK | 3p22-p21.3 | cholecystokinin |
| 42284601 | 42339191 | LOC391530 | 3p22.1 | similar to sal-like 4 |
| 42357045 | 42358863 | LOC100130064 | 3p22.1 | hypothetical LOC100130064 |
| 42413579 | 42427069 | LYZL4 | 3p22.1 | lysozyme-like 4 |
| 42519121 | 42554064 | VIPR1 | 3p22 | vasoactive intestinal peptide receptor 1 |
| 42564476 | 42598432 | SEC22C | 3p22.1 | SEC22 vesicle trafficking protein |
| | | | | homolog C (S. cerevisiae) |
| 42607302 | 42611494 | SS18L2 | 3p21 | synovial sarcoma translocation gene |
| | | | | on chromosome 18-like 2 |
| 42617151 | 42665237 | NKTR | 3p23-p21 | natural killer-tumor recognition |
| | | | | sequence |
| 42675878 | 42684076 | ZBTB47 | 3p22.1 | zinc finger and BTB domain |
| | | | | containing 47 |
| 42702015 | 42708942 | KBTBD5 | 3p22.1 | kelch repeat and BTB (POZ) domain |
| | | | | containing 5 |
| 42709159 | 42718017 | HHATL | 3p22.1 | hedgehog acyltransferase-like |
| 42724878 | 42789749 | CCDC13 | 3p22.1 | coiled-coil domain containing 13 |
| 42799404 | 42821031 | HIGD1A | 3p22.1 | HIG1 domain family, member 1A |
| 42825968 | 42883779 | CCBP2 | 3p21.3 | chemokine binding protein 2 |
| 42888688 | 42892637 | CYP8B1 | 3p22-p21.3 | cytochrome P450, family 8, subfamily |
| | | | | B, polypeptide 1 |
| 42905823 | 42906802 | LOC729102 | 3p22.1 | similar to Heterogeneous nuclear |
| | | | | ribonucleoprotein A1 (Helix- |
| | | | | destabilizing protein) (Single-strand |
| | | | | RNA-binding protein) (hnRNP core |
| | | | | protein A1) (HDP) |
| 42922406 | 42934136 | ZNF662 | 3p22.1 | zinc finger protein 662 |
| 42995763 | 43074211 | LOC729085 | 3p22.1 | hypothetical protein LOC729085 |
| 43087788 | 43088201 | LOC100132850 | 3p22.1 | hypothetical protein LOC100132850 |
| 43095730 | 43122569 | C3orf39 | 3p22.1 | chromosome 3 open reading frame 39 |
| 43303008 | 43367639 | SNRK | 3p22.1 | SNF related kinase |
| 43382822 | 43638564 | TMEM16K | 3p22.1-p21.33 | transmembrane protein 16K |

Table 24: The nucleotide coordinates of polynucleotides which can be used as FISH probes capable of detecting a genetic abnormality on human chromosome 3p22.1 are provided. The first and last nucleotide coordinates (defining each polynucleotide) are given with reference to chromosome 3 of Homo sapiens Genome (Build 36.3). Chromosome: 3; Region: 39,300,001..43,600K.

TABLE 25
FISH probe on 10q22-23

| First | Last | | | |
|---|---|---|---|---|
| nucleotide | nucleotide | | Cytological | |
| coordinate | coordinate | Symbol | band/locus | Description |
| 71231650 | 71388909 | COL13A1 | 10q22 | collagen, type XIII, alpha 1 |
| 71482363 | 71542046 | H2AFY2 | 10q22 | H2A histone family, member Y2 |
| 71542036 | 71562696 | AIFM2 | 10q22.1 | apoptosis-inducing factor, mitochondrion- |
| | | | | associated, 2 |
| 71567739 | 71576502 | TYSND1 | 10q22.1 | trypsin domain containing 1 |
| 71579966 | 71600275 | SAR1A | 10q22.1 | SAR1 gene homolog A (S. cerevisiae) |
| 71593347 | 71593991 | CALM2P2 | 10q22.1 | calmodulin 2 pseudogene 2 |
| 71632592 | 71663196 | PPA1 | 10q11.1-q24 | pyrophosphatase (inorganic) 1 |
| 71684719 | 71707727 | NPFFR1 | 10q21-q22 | neuropeptide FF receptor 1 |
| 71728735 | 71812388 | LRRC20 | 10q22.1 | leucine rich repeat containing 20 |
| 71819026 | 71820495 | C10orf37 | 10q22.1 | chromosome 10 open reading frame 37 |
| 71833928 | 71853676 | EIF4EBP2 | 10q21-q22 | eukaryotic translation initiation factor 4E |
| | | | | binding protein 2 |
| 71862077 | 71871429 | NODAL | 10q22.1 | nodal homolog (mouse) |
| 71908041 | 71955804 | LOC100132225 | 10q22.1 | hypothetical protein LOC100132225 |
| 71908570 | 71998211 | KIAA1274 | 10q22.1 | KIAA1274 |
| 72027110 | 72032537 | PRF1 | 10q22 | perforin 1 (pore forming protein) |
| 72102565 | 72192203 | ADAMTS14 | 10q21 | ADAM metallopeptidase with |
| | | | | thrombospondin type 1 motif, 14 |
| 72201001 | 72215163 | C10orf27 | 10q22.1 | chromosome 10 open reading frame 27 |
| 72223929 | 72224285 | LOC338611 | 10q22.1 | similar to 40S ribosomal protein S26 |
| 72245722 | 72309873 | SGPL1 | 10q21 | sphingosine-1-phosphate lyase 1 |
| 72313273 | 72318547 | PCBD1 | 10q22 | pterin-4 alpha-carbinolamine |
| | | | | dehydratase/dimerization cofactor of |
| | | | | hepatocyte nuclear factor 1 alpha |
| 72642353 | 72729722 | UNC5B | 10q22.1 | unc-5 homolog B (C. elegans) |
| 72646987 | 72647588 | LOC728978 | 10q22.1 | hCG1818231 |
| 72749016 | 72793153 | SLC29A3 | 10q22.1 | solute carrier family 29 (nucleoside |
| | | | | transporters), member 3 |
| 72826697 | 73245710 | CDH23 | 10q21-q22 | cadherin-like 23 |
| 73141464 | 73169435 | C10orf105 | 10q22.1 | chromosome 10 open reading frame 105 |
| 73177319 | 73203343 | C10orf54 | 10q22.1 | chromosome 10 open reading frame 54 |
| 73246061 | 73281088 | PSAP | 10q21-q22 | prosaposin (variant Gaucher disease and |
| | | | | variant metachromatic leukodystrophy) |
| 73394126 | 73443318 | CHST3 | 10q22.1 | carbohydrate (chondroitin 6) |
| | | | | sulfotransferase 3 |
| 73488799 | 73518773 | SPOCK2 | 10pter-q25.3 | sparc/osteonectin, cwcv and kazal-like |
| | | | | domains proteoglycan (testican) 2 |
| 73526284 | 73645700 | ASCC1 | 10pter-q25.3 | activating signal cointegrator 1 complex |
| | | | | subunit 1 |
| 73645812 | 73665624 | C10orf104 | 10q22.1 | chromosome 10 open reading frame 104 |
| 73703683 | 73705803 | DDIT4 | 10pter-q26.12 | DNA-damage-inducible transcript 4 |
| 73762594 | 73784875 | DNAJB12 | 10q22.1 | DnaJ (Hsp40) homolog, subfamily B, |
| | | | | member 12 |
| 73797104 | 74055905 | CBARA1 | 10q22.1 | calcium binding atopy-related autoantigen 1 |
| 74066261 | 74066541 | LOC100129990 | 10q22.1 | hypothetical LOC100129990 |
| 74121895 | 74317458 | CCDC109A | 10q22.1 | coiled-coil domain containing 109A |
| 74323345 | 74362793 | OIT3 | 10q22.1 | oncoprotein induced transcript 3 |
| 74347072 | 74348298 | LOC100131044 | 10q22.1 | hypothetical LOC100131044 |
| 74364944 | 74384516 | PLA2G12B | 10q22.1 | phospholipase A2, group XIIB |
| 74435555 | 74436377 | LOC729046 | 10q22.1 | similar to 60S ribosomal protein L17 |
| | | | | (L23) |
| 74436981 | 74526630 | P4HA1 | 10q21.3-q23.1 | procollagen-proline, 2-oxoglutarate 4- |
| | | | | dioxygenase (proline 4-hydroxylase), |
| | | | | alpha polypeptide I |
| 74540216 | 74561587 | NUDT13 | 10q22.1 | nudix (nucleoside diphosphate linked |
| | | | | moiety X)-type motif 13 |
| 74564289 | 74597823 | ECD | 10q22.1 | ecdysoneless homolog (Drosophila) |
| 74597883 | 74674446 | FAM149B1 | 10q22.2 | family with sequence similarity 149, |
| | | | | member B1 |
| 74672588 | 74677031 | DNAJC9 | 10q22.2 | DnaJ (Hsp40) homolog, subfamily C, |
| | | | | member 9 |
| 74678607 | 74682457 | MRPS16 | 10q22.1 | mitochondrial ribosomal protein S16 |
| 74683526 | 74788618 | TTC18 | 10q22.2 | tetratricopeptide repeat domain 18 |
| 74805210 | 74843809 | ANXA7 | 10q21.1-q21.2 | annexin A7 |
| 74851969 | 74852465 | LOC100131526 | 10q22.2 | similar to ribosomal protein L26 |
| 74853343 | 74863325 | ZMYND17 | 10q22.2 | zinc finger, MYND-type containing 17 |
| 74866618 | 74925758 | PPP3CB | 10q21-q22 | protein phosphatase 3 (formerly 2B), |
| | | | | catalytic subunit, beta isoform |
| 74927302 | 75005439 | USP54 | 10q22.2 | ubiquitin specific peptidase 54 |
| 75061418 | 75071521 | MYOZ1 | 10q22.1 | myozenin 1 |
| 75075296 | 75080793 | SYNPO2L | 10q22.2 | synaptopodin 2-like |
| 75104037 | 75138147 | CTGLF2 | 10q22.2 | centaurin, gamma-like family, member 2 |
| 75146848 | 75160272 | LOC729096 | 10q22.2 | similar to BMS1-like, ribosome assembly |
| | | | | protein |
| 75160840 | 75167175 | GLUDP3 | 10q22.1 | glutamate dehydrogenase pseudogene 3 |
| 75174138 | 75201925 | SEC24C | 10q22.2 | SEC24 related gene family, member C (S. cerevisiae) |
| 75202055 | 75205983 | FUT11 | 10q22.2 | fucosyltransferase 11 (alpha (1,3) |
| | | | | fucosyltransferase) |
| 75211834 | 75213137 | CHCHD1 | 10q22.2 | coiled-coil-helix-coiled-coil-helix domain |
| | | | | containing 1 |
| 75215611 | 75231557 | KIAA0913 | 10q22.2 | KIAA0913 |
| 75231675 | 75241348 | NDST2 | 10q22 | N-deacetylase/N-sulfotransferase |
| | | | | (heparan glucosaminyl) 2 |
| 75242265 | 75304349 | CAMK2G | 10q22 | calcium/calmodulin-dependent protein |
| | | | | kinase (CaM kinase) II gamma |
| 75339740 | 75341994 | C10orf55 | 10q22.2 | chromosome 10 open reading frame 55 |
| 75340896 | 75347261 | PLAU | 10q24 | plasminogen activator, urokinase |
| 75427878 | 75549924 | VCL | 10q22.1-q23 | vinculin |
| 75550021 | 75580832 | AP3M1 | 10q22.2 | adaptor-related protein complex 3, mu 1 |
| | | | | subunit |
| 75580971 | 76139066 | ADK | 10q22 | adenosine kinase |
| 75852288 | 75854299 | LOC729142 | 10q22.2 | similar to Ras-related protein Rab-5C |
| 75957348 | 75957717 | MRPL35P3 | 10q22.2 | mitochondrial ribosomal protein L35 |
| | | | | pseudogene 3 |
| 76174146 | 76178502 | LOC645646 | 10q22.2 | hypothetical LOC645646 |
| 76256385 | 76462645 | MYST4 | 10q22.2 | MYST histone acetyltransferase |
| | | | | (monocytic leukemia) 4 |
| 76467600 | 76488278 | DUPD1 | 10q22.2 | dual specificity phosphatase and pro |
| | | | | isomerase domain containing 1 |
| 76518757 | 76519608 | PPIAP13 | 10q11.2-q23 | peptidylprolyl isomerase A (cyclophilin |
| | | | | A) pseudogene 13 |
| 76524196 | 76538976 | DUSP13 | 10q22.2 | dual specificity phosphatase 13 |
| 76541471 | 76606455 | SAMD8 | 10q22.2 | sterile alpha motif domain containing 8 |
| 76640569 | 76661212 | VDAC2 | 10q22 | voltage-dependent anion channel 2 |
| 76663735 | 76665776 | COMTD1 | 10q22.2 | catechol-O-methyltransferase domain |
| | | | | containing 1 |
| 76811981 | 76812669 | SPA17P1 | 10q22.2 | sperm autoantigenic protein 17 |
| | | | | pseudogene 1 |
| 76825430 | 76828717 | LOC439985 | 10q22.2 | hypothetical gene supported by |
| | | | | AK125693 |
| 76827915 | 76831431 | ZNF503 | 10q22.2 | zinc finger protein 503 |
| 76832118 | 76838072 | LOC100131213 | 10q22.2 | hypothetical protein LOC100131213 |
| 76982221 | 76982316 | MIRN606 | 10q22.2 | microRNA 606 |
| 77212525 | 77987136 | C10orf11 | 10q22.2-q22.3 | chromosome 10 open reading frame 11 |
| 78299366 | 79067583 | KCNMA1 | 10q22.3 | potassium large conductance calcium- |
| | | | | activated channel, subfamily M, alpha |
| | | | | member 1 |
| 78884873 | 78886481 | LOC729187 | 10q22.3 | hypothetical protein LOC729187 |
| 79158533 | 79164538 | LOC399783 | 10q22.3 | hypothetical gene supported by |
| | | | | NM_018181 |
| 79168007 | 79168816 | LOC100129156 | 10q22.3 | hypothetical LOC100129156 |
| 79209259 | 79211739 | LOC340780 | 10q22.3 | inosine monophosphate dehydrogenase 1 |
| | | | | pseudogene |
| 79220555 | 79356354 | DLG5 | 10q23 | discs, large homolog 5 (Drosophila) |
| 79296672 | 79298015 | LOC100131132 | 10q22.3 | hypothetical protein LOC100131132 |
| 79357445 | 79358388 | LOC100128292 | 10q22.3 | hypothetical LOC100128292 |
| 79405900 | 79459265 | POLR3A | 10q22-q23 | polymerase (RNA) III (DNA directed) |
| | | | | polypeptide A, 155 kDa |
| 79463580 | 79470480 | RPS24 | 10q22-q23 | ribosomal protein S24 |
| 79498517 | 79500788 | LOC401646 | 10q22.3 | similar to Guanine nucleotide-binding |
| | | | | protein G(i), alpha-2 subunit (Adenylate |
| | | | | cyclase-inhibiting G alpha protein) |
| 79836307 | 80014689 | LOC100132987 | 10q22.3 | hypothetical protein LOC100132987 |
| 80631347 | 80746279 | ZMIZ1 | 10q22.3 | zinc finger, MIZ-type containing 1 |
| 80777226 | 80785096 | PPIF | 10q22-q23 | peptidylprolyl isomerase F (cyclophilin F) |
| 80812087 | 80875389 | C10orf56 | 10q22.3 | chromosome 10 open reading frame 56 |
| 80928750 | 80929874 | TPRX1P1 | 10q22.3 | tetra-peptide repeat homeobox 1 |
| | | | | pseudogene 1 |
| 80935734 | 80940684 | LOC729815 | 10q22.3 | hypothetical protein LOC729815 |
| 80942363 | 80946202 | EIF5AL1 | 10q22.3 | eukaryotic translation initiation factor 5A- |
| | | | | like 1 |
| 80985614 | 80990169 | SFTPA2 | 10q22.3 | surfactant, pulmonary-associated protein |
| | | | | A2 |
| 81040722 | 81045208 | SFTPA1 | 10q22.3 | surfactant, pulmonary-associated protein |
| | | | | A1 |
| 81057013 | 81115198 | LOC650623 | 10q22.3 | hypothetical LOC650623 |
| 81131411 | 81143340 | FAM22B | 10q22.3 | family with sequence similarity 22, |
| | | | | member B |
| 81248737 | 81249661 | TPRX1P2 | 10q22.3 | tetra-peptide repeat homeobox 1 |
| | | | | pseudogene 2 |
| 81255626 | 81260577 | LOC727749 | 10q22.3 | hypothetical protein LOC727749 |
| 81262290 | 81262832 | EIF5AP1 | 10q23.3 | eukaryotic translation initiation factor 5A |
| | | | | pseudogene 1 |
| 81305573 | 81310114 | SFTPA2B | 10q22.3 | surfactant, pulmonary-associated protein |
| | | | | A2B |
| 81345039 | 81361329 | LOC100132477 | 10q22.3 | similar to surfactant, pulmonary- |
| | | | | associated protein A2 |
| 81360664 | 81363921 | SFTPA1B | 10q22.3 | surfactant, pulmonary-associated protein |
| | | | | A1B |
| 81376936 | 81435395 | LOC642300 | 10q22.3 | hypothetical LOC642300 |
| 81451610 | 81462705 | FAM22C | 10q22.3 | family with sequence similarity 22, |
| | | | | member C |
| 81575260 | 81578077 | LOC642361 | 10q22.3 | hypothetical LOC642361 |
| 81589513 | 81604115 | FAM22E | 10q22.3 | family with sequence similarity 22, |
| | | | | member E |
| 81619829 | 81624732 | LOC642413 | 10q22.3 | similar to Cathepsin L precursor (Major |
| | | | | excreted protein) (MEP) |
| 81641099 | 81642911 | LOC100132402 | 10q22.3 | similar to PGGT1B protein |
| 81669914 | 81672855 | MBL1P1 | 10q22.2-q22.3 | mannose-binding lectin (protein A) 1, |
| | | | | pseudogene 1 |
| 81687476 | 81698841 | SFTPD | 10q22.2-q23.1 | surfactant, pulmonary-associated protein D |
| 81731575 | 81733155 | LOC100130879 | 10q22.3 | hypothetical LOC100130879 |
| 81774447 | 81778155 | LOC642521 | 10q22.3 | similar to nuclear DNA-binding protein |
| 81781664 | 81782188 | LOC642538 | 10q22.3 | similar to nuclear DNA-binding protein |
| 81790318 | 81790779 | LOC727879 | 10q22.3 | similar to nuclear DNA-binding protein |
| 81828406 | 81842286 | C10orf57 | 10q22.3 | chromosome 10 open reading frame 57 |
| 81882238 | 81894766 | PLAC9 | 10q22.3 | placenta-specific 9 |
| 81904860 | 81955308 | ANXA11 | 10q23 | annexin A11 |
| 81996955 | 81997419 | EIF5AL3 | 10q22.3 | eukaryotic translation initiation factor 5A- |
| | | | | like 3 |
| 82002463 | 82003375 | LOC100130698 | 10q23.1 | hypothetical protein LOC100130698 |
| 82021556 | 82039414 | MAT1A | 10q22 | methionine adenosyltransferase I, alpha |
| 82085841 | 82106480 | DYDC1 | 10q23.1 | DPY30 domain containing 1 |
| 82106538 | 82117809 | DYDC2 | 10q23.1 | DPY30 domain containing 2 |
| 82158222 | 82182733 | C10orf58 | 10q23.1 | chromosome 10 open reading frame 58 |
| 82204047 | 82269366 | TSPAN14 | 10q23.1 | tetraspanin 14 |
| 82279333 | 82285678 | LOC727923 | 10q23.1 | hypothetical protein LOC727923 |
| 82287638 | 82396296 | SH2D4B | 10q23.1 | SH2 domain containing 4B |
| 82399492 | 82403468 | LOC642666 | 10q23.1 | hypothetical LOC642666 |
| 82466219 | 82466804 | LOC100128756 | 10q23.1 | hypothetical LOC100128756 |
| 82525688 | 82527904 | LOC647532 | 10q23.1 | phenylalanine-tRNA synthetase-like, beta |
| | | | | subunit pseudogene |
| 82886276 | 82887071 | LOC389990 | 10q23.1 | hypothetical LOC389990 |
| 83251196 | 83253047 | LOC727960 | 10q23.1 | hypothetical protein LOC727960 |
| 83625077 | 84735341 | NRG3 | 10q22-q23 | neuregulin 3 |
| 85061367 | 85064419 | LOC728027 | 10q23.1 | similar to serine/threonine kinase |
| 85422142 | 85425169 | LOC728050 | 10q23.1 | hypothetical protein LOC728050 |
| 85889165 | 85903291 | GHITM | 10q23.1 | growth hormone inducible |
| | | | | transmembrane protein |
| 85916964 | 85921704 | LOC642934 | 10q23.1 | hypothetical protein LOC642934 |
| 85923534 | 85935030 | C10orf99 | 10q23.1 | chromosome 10 open reading frame 99 |
| 85944497 | 85967102 | PCDH21 | 10q22.1-q22.3 | protocadherin 21 |
| 85970221 | 85975264 | LRIT2 | 10q23.1 | leucine-rich repeat, immunoglobulin-like |
| | | | | and transmembrane domains 2 |
| 85981256 | 85991197 | LRIT1 | 10q23 | leucine-rich repeat, immunoglobulin-like |
| | | | | and transmembrane domains 1 |
| 85994789 | 86008924 | RGR | 10q23 | retinal G protein coupled receptor |
| 86078390 | 86268256 | KIAA1128 | 10q23.1 | KIAA1128 |
| 86202717 | 86217041 | LOC100130759 | 10q23.1 | hypothetical LOC100130759 |
| 86298196 | 86311057 | LOC100131699 | 10q23.1 | hypothetical protein LOC100131699 |
| 86310158 | 86311061 | LOC439992 | 10q23.1 | similar to ribosomal protein S3a |
| 87349292 | 88116230 | GRID1 | 10q22 | glutamate receptor, ionotropic, delta 1 |
| 88014430 | 88014524 | MIRN346 | 10q23.2 | microRNA 346 |
| 88184993 | 88271521 | WAPAL | 10q23.2 | wings apart-like homolog (Drosophila) |
| 88380406 | 88381458 | RPL7AP8 | 10q23.2 | ribosomal protein L7a pseudogene 8 |
| 88404294 | 88416197 | OPN4 | 10q22 | opsin 4 (melanopsin) |
| 88418301 | 88485805 | LDB3 | 10q22.3-q23.2 | LIM domain binding 3 |
| 88505000 | 88625802 | LOC100132592 | 10q23.2 | hypothetical protein LOC100132592 |
| 88506376 | 88674925 | BMPR1A | 10q22.3 | bone morphogenetic protein receptor, |
| | | | | type IA |
| 88685576 | 88707352 | MMRN2 | 10q23.2 | multimerin 2 |
| 88708395 | 88712995 | SNCG | 10q23.2-q23.3 | synuclein, gamma (breast cancer-specific |
| | | | | protein 1) |
| 88715062 | 88719590 | LOC100128309 | 10q23.2 | hypothetical protein LOC100128309 |
| 88718168 | 88720646 | C10orf116 | 10q23.2 | chromosome 10 open reading frame 116 |
| 88718850 | 88720977 | LOC100133190 | 10q23.2 | hypothetical protein LOC100133190 |
| 88720478 | 88759940 | KIAA1975 | 10q23.2 | KIAA1975 protein similar to MRIP2 |
| 88741990 | 88750172 | BMS1P3 | 10q23.2 | BMS1 pseudogene 3 |
| 88770026 | 88774469 | FAM25A | 10q23.2 | family with sequence similarity 25, |
| | | | | member A |
| 88800223 | 88844603 | GLUD1 | 10q23.3 | glutamate dehydrogenase 1 |
| 88844933 | 88941202 | FAM35A | 10q23.2 | family with sequence similarity 35, |
| | | | | member A |
| 88975185 | 88984715 | FAM22A | 10q23.2 | family with sequence similarity 22, |
| | | | | member A |
| 88984971 | 89086722 | LOC728190 | 10q23.2 | hypothetical protein LOC728190 |
| 89091305 | 89094121 | LOC439994 | 10q23.2 | hypothetical gene supported by |
| | | | | AF064843; AK025716 |
| 89107457 | 89120432 | FAM22D | 10q23.2 | family with sequence similarity 22, |
| | | | | member D |
| 89133045 | 89141033 | LOC118945 | 10q23.2 | similar to Cathepsin L precursor (Major |
| | | | | excreted protein) (MEP) |
| 89254633 | 89303125 | MINPP1 | 10q23 | multiple inositol polyphosphate histidine |
| | | | | phosphatase, 1 |
| 89392343 | 89392763 | LOC100129552 | 10q23.2 | similar to ribosomal protein S26 |
| 89409456 | 89497442 | PAPSS2 | 10q23-q24 | 3′-phosphoadenosine 5′-phosphosulfate |
| | | | | synthase 2 |
| 89502855 | 89567897 | ATAD1 | 10q23.2 | ATPase family, AAA domain containing 1 |
| 89567950 | 89594928 | CFLP1 | 10q23.2 | cofilin pseudogene 1 |
| 89613175 | 89718512 | PTEN | 10q23.3 | phosphatase and tensin homolog (mutated |
| | | | | in multiple advanced cancers 1) |
| 89796068 | 89815704 | LOC100128990 | 10q23.31 | hypothetical LOC100128990 |
| 90023601 | 90332988 | C10orf59 | 10q23.31 | chromosome 10 open reading frame 59 |
| 90336499 | 90356712 | LIPJ | 10q23.31 | lipase, family member J |
| 90368319 | 90368672 | LOC389992 | 10q23.31 | similar to 60S ribosomal protein L7 |
| 90414074 | 90428552 | LIPF | 10q23.31 | lipase, gastric |
| 90474281 | 90502493 | LIPK | 10q23.31 | lipase, family member K |
| 90511143 | 90527979 | LIPN | 10q23.31 | lipase, family member N |
| 90535305 | 90536693 | LOC100130253 | 10q23.31 | hypothetical LOC100130253 |
| 90552467 | 90570238 | LIPM | 10q23.31 | lipase, family member M |
| 90569636 | 90601712 | ANKRD22 | 10q23.31 | ankyrin repeat domain 22 |
| 90626043 | 90627282 | LOC100132487 | 10q23.31 | hypothetical LOC100132487 |
| 90630006 | 90673224 | STAMBPL1 | 10q23.31 | STAM binding protein-like 1 |
| 90682574 | 90684664 | LOC100132116 | 10q23.31 | hypothetical protein LOC100132116 |
| 90684811 | 90702491 | ACTA2 | 10q23.3 | actin, alpha 2, smooth muscle, aorta |
| 90740268 | 90765522 | FAS | 10q24.1 | Fas (TNF receptor superfamily, member |
| | | | | 6) |
| 90955674 | 90957051 | CH25H | 10q23 | cholesterol 25-hydroxylase |
| 90963309 | 91001640 | LIPA | 10q23.2-q23.3 | lipase A, lysosomal acid, cholesterol |
| | | | | esterase (Wolman disease) |
| 91051686 | 91059013 | IFIT2 | 10q23-q25 | interferon-induced protein with |
| | | | | tetratricopeptide repeats 2 |
| 91077733 | 91090314 | IFIT3 | 10q24 | interferon-induced protein with |
| | | | | tetratricopeptide repeats 3 |
| 91110025 | 91113217 | LOC100128465 | 10q23.31 | hypothetical LOC100128465 |
| 91127793 | 91134942 | IFIT1L | 10q23.31 | interferon-induced protein with |
| | | | | tetratricopeptide repeats 1-like |
| 91142302 | 91153725 | IFIT1 | 10q25-q26 | interferon-induced protein with |
| | | | | tetratricopeptide repeats 1 |
| 91164419 | 91170733 | IFIT5 | 10q23.31 | interferon-induced protein with |
| | | | | tetratricopeptide repeats 5 |
| 91180036 | 91285293 | SLC16A12 | 10q23.31 | solute carrier family 16, member 12 |
| | | | | (monocarboxylic acid transporter 12) |
| 91332729 | 91395195 | PANK1 | 10q23.31 | pantothenate kinase 1 |
| 91342483 | 91342563 | MIRN107 | 10q23.31 | microRNA 107 |
| 91441037 | 91447665 | FLJ37201 | 10q23.31 | hypothetical protein FLJ37201 |
| 91451347 | 91524680 | MPHOSPH1 | 10q23.31 | M-phase phosphoprotein 1 |
| 91579661 | 91587441 | LOC643529 | 10q23.31 | hCG2024094 |
| 91728454 | 91728807 | LOC119358 | 10q23.31 | similar to small nuclear ribonucleoprotein |
| | | | | D2 |
| 92490555 | 92607651 | HTR7 | 10q21-q24 | 5-hydroxytryptamine (serotonin) receptor |
| | | | | 7 (adenylate cyclase-coupled) |
| 92621689 | 92658292 | RPP30 | 10q23.31 | ribonuclease P/MRP 30 kDa subunit |
| 92661837 | 92671012 | ANKRD1 | 10q23.31 | ankyrin repeat domain 1 (cardiac muscle) |
| 92710655 | 92773155 | LOC643599 | 10q23.31 | hypothetical LOC643599 |
| 92802788 | 92804816 | LOC100131370 | 10q23.31 | hypothetical LOC100131370 |
| 92901732 | 92902820 | NUDT9P1 | 10q23.32 | nudix (nucleoside diphosphate linked |
| | | | | moiety X)-type motif 9 pseudogene 1 |
| 92970349 | 93034000 | PCGF5 | 10q23.32 | polycomb group ring finger 5 |
| 93160081 | 93264500 | HECTD2 | 10q23.32 | HECT domain containing 2 |
| 93378179 | 93382838 | PPP1R3C | 10q23-q24 | protein phosphatase 1, regulatory |
| | | | | (inhibitor) subunit 3C |
| 93416517 | 93417519 | LOC441572 | 10q23.32 | similar to Glyceraldehyde-3-phosphate |
| | | | | dehydrogenase (GAPDH) |
| 93515636 | 93516942 | LOC100128043 | 10q23.32 | hypothetical LOC100128043 |
| 93548049 | 93615012 | TNKS2 | 10q23.3 | tankyrase, TRF1-interacting ankyrin- |
| | | | | related ADP-ribose polymerase 2 |
| 93555775 | 93557281 | LOC653226 | 10q23.32 | hCG1781062 |
| 93636988 | 93659106 | LOC728475 | 10q23.32 | hypothetical protein LOC728475 |
| 93656326 | 93659220 | FGFBP3 | 10q23.32 | fibroblast growth factor binding protein 3 |
| 93673716 | 93780062 | BTAF1 | 10q22-q23 | BTAF1 RNA polymerase II, B-TFIID |
| | | | | transcription factor-associated, 170 kDa |
| | | | | (Mot1 homolog, S. cerevisiae) |
| 93798379 | 94040824 | CPEB3 | 10q23.32 | cytoplasmic polyadenylation element |
| | | | | binding protein 3 |
| 93868392 | 93868977 | LOC100128302 | 10q23.32 | similar to QPS1 |
| 93965935 | 93966892 | NOLA2P1 | 10q23.32 | nucleolar protein family A, member 2 |
| | | | | pseudogene 1 |
| 94028739 | 94040955 | LOC100130772 | 10q23.32 | hypothetical protein LOC100130772 |
| 94040900 | 94103701 | MARCH5 | 10q23.32 | membrane associated ring finger |
| | | | | (C3HC4) 5 |
| 94139490 | 94170324 | LOC643768 | 10q23.32 | similar to serine/threonine kinase |
| 94203580 | 94323832 | IDE | 10q23-q25 | insulin-degrading enzyme |
| 94342971 | 94405130 | KIF11 | 10q24.1 | kinesin family member 11 |
| 94418084 | 94419685 | LOC283014 | 10q23.33 | similar to eukaryotic translation initiation |
| | | | | factor 2, subunit 2 beta, 38 kDa; |
| | | | | eukaryotic translation initiation factor 2, |
| | | | | subunit 2 (beta, 38 kD); eukaryotic |
| | | | | initiation factor 2-beta |
| 94439661 | 94445388 | HHEX | 10q23.33 | hematopoietically expressed homeobox |
| 94584450 | 94809241 | EXOC6 | 10q23.33 | exocyst complex component 6 |
| 94811011 | 94818444 | CYP26C1 | 10q23.33 | cytochrome P450, family 26, subfamily |
| | | | | C, polypeptide 1 |
| 94818482 | 94823213 | LOC100132649 | 10q23.33 | hypothetical protein LOC100132649 |
| 94823222 | 94827631 | CYP26A1 | 10q23-q24 | cytochrome P450, family 26, subfamily |
| | | | | A, polypeptide 1 |
| 94856616 | 94882150 | LOC389997 | 10q23.33 | similar to 60S ribosome subunit |
| | | | | biogenesis protein NIP7 homolog (KD93) |
| 94956401 | 94959374 | LOC387703 | 10q23.33 | similar to ATP-dependent DNA helicase |
| | | | | 2 subunit 1 (ATP-dependent DNA |
| | | | | helicase II 70 kDa subunit) (Lupus Ku |
| | | | | autoantigen protein p70) (Ku70) (70 kDa |
| | | | | subunit of Ku antigen) (Thyroid-lupus |
| | | | | autoantigen) (TLAA) (CTC box-binding |
| | | | | factor 75 kDa subunit) (CT . . . |
| 95033706 | 95034345 | LOC643863 | 10q23.33 | hypothetical LOC643863 |
| 95056176 | 95232029 | FLR1L3 | 10q24 | fer-1-like 3, myoferlin (C. elegans) |
| 95246399 | 95278839 | CEP55 | 10q23.33 | centrosomal protein 55 kDa |
| 95316412 | 95337356 | GPR120 | 10q23.33 | G protein-coupled receptor 120 |
| 95341583 | 95350983 | RBP4 | 10q23-q24 | retinol binding protein 4, plasma |
| 95362335 | 95415420 | PDE6C | 10q24 | phosphodiesterase 6C, cGMP-specific, |
| | | | | cone, alpha prime |
| 95418319 | 95452319 | C10orf4 | 10q23.33 | chromosome 10 open reading frame 4 |
| 95507668 | 95547906 | LGI1 | 10q24 | leucine-rich, glioma inactivated 1 |
| 95631033 | 95631685 | LOC100129731 | 10q23.33 | hypothetical LOC100129731 |
| 95643720 | 95652480 | TMEM20 | 10q23.33 | transmembrane protein 20 |
| 95708422 | 95709661 | PIPSL | 10q23.33 | PIP5K1A and PSMD4-like |
| 95709663 | 95711283 | LOC100101438 | 10q23.33 | phosphatidylinositol-4-phosphate 5- |
| | | | | kinase, type I, alpha pseudogene |
| 95743736 | 96078139 | PLCE1 | 10q23 | phospholipase C, epsilon 1 |
| 96029024 | 96036794 | LOC100128054 | 10q23.33 | similar to hCG2044978 |
| 96082979 | 96112673 | NOC3L | 10q23.33 | nucleolar complex associated 3 homolog |
| | | | | (S. cerevisiae) |
| 96152176 | 96286079 | TBC1D12 | 10q23.33 | TBC1 domain family, member 12 |
| 96295564 | 96351846 | HELLS | 10q24.2 | helicase, lymphoid-specific |
| 96394661 | 96397735 | LOC100130970 | 10q23.33 | hypothetical LOC100130970 |
| 96433368 | 96485514 | CYP2C18 | 10q24 | cytochrome P450, family 2, subfamily C, |
| | | | | polypeptide 18 |
| 96512453 | 96602661 | CYP2C19 | 10q24.1-q24.3 | cytochrome P450, family 2, subfamily C, |
| | | | | polypeptide 19 |
| 96688430 | 96739137 | CYP2C9 | 10q24 | cytochrome P450, family 2, subfamily C, |
| | | | | polypeptide 9 |
| 96786519 | 96819244 | CYP2C8 | 10q23.33 | cytochrome P450, family 2, subfamily C, |
| | | | | polypeptide 8 |
| 96943947 | 96976152 | C10orf129 | 10q23.33 | chromosome 10 open reading frame 129 |
| 96987319 | 97040771 | PDLIM1 | 10q22-q26.3 | PDZ and LIM domain 1 (elfin) |
| 97061520 | 97311161 | SORBS1 | 10q23.3-q24.1 | sorbin and SH3 domain containing 1 |
| 97343764 | 97345396 | LOC643981 | 10q23.33 | similar to 40S ribosomal protein S3a (V- |
| | | | | fos transformation effector protein) |
| 97355676 | 97406557 | ALDH18A1 | 10q24.3 | aldehyde dehydrogenase 18 family, |
| | | | | member A1 |
| 97413163 | 97443890 | TCTN3 | 10q23.33 | tectonic family member 3 |
| 97461526 | 97627013 | ENTPD1 | 10q24 | ectonucleoside triphosphate |
| | | | | diphosphohydrolase 1 |
| 97657712 | 97688040 | LOC100127889 | 10q23.33 | hypothetical protein LOC100127889 |
| 97711321 | 97734443 | LOC100130696 | 10q23.33 | hypothetical protein LOC100130696 |
| 97737206 | 97745041 | LOC100131720 | 10q23.33 | hypothetical protein LOC100131720 |
| 97749873 | 97782431 | CC2D2B | 10q23.33 | coiled-coil and C2 domain containing 2B |
| 97793141 | 97810612 | CCNJ | 10pter-q26.12 | cyclin J |
| 97838656 | 97839976 | LOC728558 | 10q23.33 | hypothetical protein LOC728558 |
| 97879462 | 97913507 | ZNF518A | 10q23.33 | zinc finger protein 518A |
| 97939012 | 97939990 | LOC399804 | 10q23.33 | similar to nucleophosmin 1 isoform 1 |
| 97941445 | 98021316 | BLNK | 10q23.2-q23.33 | B-cell linker |

Table 25: The nucleotide coordinates of polynucleotides which can be used as FISH probes capable of detecting a genetic abnormality on human chromosome 10q22-23 are provided. The first and last nucleotide coordinates (defining each polynucleotide) are given with reference to chromosome 10 of Homo sapiens Genome (Build 36.3). Chromosome: 10; Region: 71,300,001 . . . 98M.

[0301] Although the invention has been described in conjunction with specific embodiments thereof, it is evident that many alternatives, modifications and variations will be apparent to those skilled in the art. Accordingly, it is intended to embrace all such alternatives, modifications and variations that fall within the spirit and broad scope of the appended claims.

[0302] All publications, patents and patent applications mentioned in this specification are herein incorporated in their entirety by reference into the specification, to the same extent as if each individual publication, patent or patent application was specifically and individually indicated to be incorporated herein by reference. In addition, citation or identification of any reference in this application shall not be construed as an admission that such reference is available as prior art to the present invention. To the extent that section headings are used, they should not be construed as necessarily limiting.

### REFERENCES

### Additional References are Cited in Text

[0303] 1. Melamed M R. Lung cancer screening results in the National Cancer Institute New York Study. Cancer 2000; 89 (11 Suppl):2356-2362.
[0304] 2. Jiang F, Caraway N P, Nebiyou Bekele B, et al. Surfactant protein A gene deletion and prognostics for patients with stage I non-small lung cancer. Clin Cancer Res. 2005 Aug. 1; 11 (15):5417-24
[0305] 3. Fernandez R L, Zaidi T, Caraway N, Katz R. Field cancerization I non-small cell lung cancer demonstrated by fluorescence in situ hybridization (FISH) for 3p22.1 and 10q22-23: correlation of molecular abnormalities with clinical variables. Presented at Lung SPORE Winter Meeting: Los Angeles, Calif.; Jan. 24-26, 2006.
[0306] 4. Barkan G A, Caraway N P, Jiang F, et al. Comparison of molecular abnormalities in bronchial brushings and tumor touch preparations. Cancer 2005; 105 (1):35-43
[0307] 5. Prindiville S A, Byers T, Hirsch F R, et al. Sputum cytological atypia as a predictor of incident lung cancer in a cohort of heavy smokers with airflow obstruction. Cancer Epidemiol Biomarkers Prey 2003; 12:987-993.
[0308] 6. Shimoni, A., Nagler, A., Kaplinsky, C., Reichart, M., Avigdor, A., Hardan, I., Yeshurun, M., Daniely, M., Zilberstein, Y., Amariglio, N., Brok-Simoni, F., Rechavi, G., Trakhtenbrot, L. (2002) Chimerism testing and detection of minimal residual disease after allogeneic hematopoiatic transplantation using BioView (Duet™) combined morphological and cytological analysis. Leukemia 16, 1413-1418.
[0309] 7. Hardan I., Rothman R., Gelibter A., Cohen N., Shomoni A., Sokolovsky M., Reichart M., Ishoev G., Amariglio, N. Rechavi., G. Nagler A., Trakhtenbrot, L. (2004). Determination of chromosome 13 in the bone marrow cells of patients with multiple myeloma using combined morphological and FISH analysis. Experimental Hematology, 32, 254-260.
[0310] 8. Daniely M., Rona R., Kaplan T., Olsfanger S., Elboim L., Zilberstain Y., Friberger A., Kidron D., Kaplan E., Lew S., Leibovitch I. (2005). Combined analysis of morphology and Fluorescence in situ hybridization significantly increases accuracy of bladder cancer detection in voided urine samples. Urology 66, 1354-1359.
[0311] 9. WO0212563A2 to KATZ, R et al.;
[0312] 10. WO0626714 to KATZ, R et al.;
[0313] 11. WO07087612A2 to KATZ, R et al.;
[0314] 12. WO0049391A1;
[0315] 13. U.S. Pat. Appl. No. 20060078885 to Katz R., et al.;
[0316] 14. U.S. 2004-0197839 to Daniely M. et al.;
[0317] 15. Nymark P., et al., Cancer Research 66, 5737-5743, 2006;
[0318] 16. Girard L., et al., Cancer Research 60, 4894-4906, 2000.

The application's sequence listing, which the Patent Office published only in electronic form, follows.

SEQUENCE LISTING (9 sequences)

SEQ ID NO: 1 - DNA, 186317 bp, Homo sapiens
gaattctctcttcttagaaggcaagaactgaagttgctgcagacctgtataaattaggcaccgctaacagtagtgacacacgattctttcggtaacctctgtggccagtggtgcctctgcctgagtttcacttttgactgctgagctggctccacccactcggcctggcaggctgtactgagcttgcgctactggcccagatcccatgcccactgtggacaagccaggcacagaatggcaaggggtgtgtgagtgagcaagtgtagggtccagccatgatgcacagccaggtgtgccagctgctgcagtggggtgggcagctccaggcaccagcacaggcgtgagttttgtgaggggctgtagctgggccaggcagcagcatctggacagggggaatgcagtggtgcccaaaaactcagagacaccagcaaccacagagccccaagggggtgttacagcatgtcacagctctgactcagggagtcccgaggtctgggtccccagaagggtcacagctctcttgtcttgtagtctggcgaatgggaacatgtcactgctggcagcttggcaggccagccaggaacatgtttcagcttatttgtgttatagcttgtttggtcctgctgccccactctggcccatgatggctcctgggctggcctggccccaccaccacttcccatcacatgggacagccatccagcactggcatagggtgagagggattcagtgttacagctcctttcgcatccgggcaggctccaggttcatgtcctgtgtccaagaggaatgaggttatgtggacaaccagagcgtgagcaaggtggagaagagttttattgagtgacaaaacagctgctaacaccagaggggaccttaagtgggtagcccctacccaaaggcaggtagttccgacatgtcgctgagtctggggtttttatgggctcagaataggggagtgtgtgctgagtggtccacggactggcctggaaaaagcaccattcaattagctaaatagtatcaagaaagttctcacttcgggttgaggacccaacctggaactggcagcccagttttcaggctctaagctgtctttgccttgaacatcaggtttcaccaaggacctgcccctgtctgcctaggaatttggctgtctcctgctgctatcagtaggagataaccaggagaatgcaaccctcttgggaatctttgataatcttagagagcgaacaggacattccagagttacatgggacgagatttgaatccgtttgttttcttttcttttttgtttgagacagggtcttgctgtgttgccaggctggagtgcagtagcataatcacagctcctcttgggctcaaacaatcctcctgcctcagcctcctgagtaggtgggactacaggcatgtgattcaccacatctggctaatgtttttacttattgggaatcacaagtctcactttgttgcccaggctggtctcaaactcctgggctcaagcaatcctcctgccttggcatcccaaagtgctgggattacaggcaagagccaccgtgcctggtggaatccatttatcaacagaaggagaaaatggaaagaaaatcccagaagacatagtacttgggtatgtccagattacatgtttatgaaaattatggagaacagactctccccgtgtttattcaaaggaaaattaggacaaagcctgcaaaaacattcatactgtgcctcccttagaattgaagcaaagtttccaaatttaattgtgcaaggccttgactgtgctgaagtgtttatctgtaaaaatatggtaataaaaaagagcttatatgtctgtgaacatatgaatttaaagagaatattctcttcagttagttattattttcattccagagcttttaaaattgagtatcataattagtataattgtgataagttaatactgaaattccactgaggaaaaaaatgcgaaatgcttacgtatttaggtttctttgatcatgggctttgagttttttcataatttcatttaaatatgatatgattcatttaatttaacttaatttatttatttattctctgcttcataccagaatagatgtaagtctacctacaaaaacaaggagaagggaaaactagacacttacaaagagatttgtaaagttaaaaagagaacagtttctcaggagtaatacaattgttcttacatcgaaaagcagttaggcagttctctgagtatcctcataaatagaaaccatgatataaaaaaaacacatccttgacaacattcctaaaagacagatgacaatgagtgtcatttgtgctgtttccctccctgtctctcagcccaggctgttgacagcacagactgatgacatcacattgtcatgctgattgcatgacaattcagcaagaccagttctcagggtgacaaggggtagcagaggctaattgaaatgcaatacacattctcagtttctctgtggatctgatttgatccaggggtgaactataaactgcctggagcgatatcccctgtatactgtttcaatcaaactacggataaatattggacggcagtaacttactgctgggataatgacactataatccaggaataaaatgtgaatgccccacaactatgtgaatagacttcctcctctaggccagggtcctctaaatttaatctgaaagactggttcaggccatgattcaggggctggagaggggatcagacatgcctcattatgtcctcctcccttttgaattcaggaaaagccaaccagcatttaacattaacaggaccttaagtctgataaacagttacaatttattctctctgaagcctgctacctggaagcttcatctgcatgataaaactttagtctccacaacctcttatcttaacccagatattcctttctattgacaataactttttcaaccagttgccaacccaaaaaatttttaatctacctataacttaaaagccccaccccattccacaccccacctccacttcgagttgccctgcctttctggatcctcctctgatcaatacttccctttcaacacctagttttattatccaactatagattctcttccaaagtcagtcttacattctaaaatccatttatttcttttcttcccctcttaactctcaagaaactctgagctaaacaaaatgcataaaagcatctataattccttctctaagtctacagcaatccaacatataccttaaatgtatttcattgatgtctcacatgtccctaagatgtataaaaccaggctgcacccctgaccactttgggcacatgttctcaggatctcctgaaagctgagtcatgggccatggccacttatatttggctcagtttaaatctcttcaaatattttatagagtttgactctttttgtcaacaacaccataggctcaaatgcctaactttgcaaatgggtagtgactaaatccaggaagatccctgctgtcaagcattcacctcttacttgctggttcatgtaggggtctagaaggcccaaagggaggagcctggtgttggggaggttgaacaatagctatttcccaatcagtataaaattattattattttattatttttttttagacagagtcttgctctgttgcccaggctggaatgcagtggtgcgatctcagctcactgcaagctccgcctcccaggttcacaccattctcctgcctcagcctcctgattagttaggagtacaggcacctgccaccacgcccagctaattttttgtatttttagtagagacggggtttcaccgtgttagccaggatagtctcgatctcctgacctcgtgatctgcccgccttggcctcccaaagtgctgggattacaggcatgaaccaccgtgcccggccgaaattattttaataatataacagctggtatggacagtcatatatgccagctgatgtcaactctccaacacataacaaaattacaaatatatatatatatatcgtttgacttgaggctttttaaacttgagcttcagggactctactgctagtttcatggtaaaaatctaagtgcattgtttgtaagacagacaataaacaatgctaaatttcatcaagtcttccctgtaatatgcctgtagggcactatctgtccccactgttgtttattaaagagatgtgataagcccaagatagttaatggacatctgccctgccatgtggcctctgaatgttgaggagacacatatactgtcagagtgtatacagtgtatcctcctacaccccaccctgagctggcccaactctctggaatcaaggttagggtagggagtgtgatccaagccatacacaaatccaacacagagcactaagagagtgcttatccagcttctcagtgtcctgcggttgcattcagacaacagtgctctttcggctagggttaggttcaacttcacttaactgaaaattcaaaagagaagaggttaaacacatggggtttcttctctcatatatagcaagtccataaacaggcagtccagagccccagactccatctattattctgccccaccagctgcagcacatccatatagcacggttacttcatggtccaaggcagctatcagacttccagcatcgtgttggcattccaggaagcggaaggaataagaaagaataccaggctgggtgcggtggctcacgcctgtaatcccagcactttgggaggccgaggtgggcagatcacgaggtcaggagatcgagaccatcctggctaacatggtgaaaccctgtctctactaaaaatacaaaaaaattcgctggcgtggtggcaggcgcctgtagtcccacctaattggaaggctgatgcaggagaatggtgtgaacccaggaggtggagcttgcagtgagccaagatcgtgccactgcactccagcctggcagaaaaaggaagactccgtctcaaaaaaaaaaaaaaaaagaaagaaagaagaccaaaacaggcgcttatcccaactgagtcagcttcctttaaacaatttctatggtttgaatatttttttgtcccctccaaaacttatgttgaaacttaatccccaatgttggcagtactgagaggtagggctttaagaggtgacggggtcatgggaggtctgccctcattagtggattaatctattcgtggatttaagaattaatgggataatggattaatggattatcatgggaatgggactggtgactttataagaacaggaagaaaaacctgagctagcatgctcagttctgtcaccacgtgatgccatgtgccacctcaggacccttcagagagtccctaccagcaagaagaccctcgccagatgtggccccttgaccttggacctctcagcctctataactgtaagaaataaattccttctctttgtaaatcacccagtttccagtatacagaaaatgaagtaacacagcaatctttttggataacccattcaacacttctgcctacatcccattggctacacctcgcaaggaaagctgtgaaacgtagtatagtcttttagctgggcacactgcagcccagaataaaatcaggattctgttttactacgaaaaaaggagagaatggatattagctggcaacccacaatctccaccacaaaccaattacagcaaatcatatagcaaagcaacaaagaatggcaactacatgatttattatttatgctgaactaacccaagtcagaagatcaaccaaaaattctgcagcactagatctttcttgagaaaaaaggtataatttaactttttaaaataaaatgcaaattatgtccttggtgacttcaccctttgacttggcacaaactcttcccaaaatgtcccctaaggtggaacaatctagatcacatttggctccacctttactattttcttaatttattgatagtttctctcatcataattccattacataaggagggaatcccacaacctcagtaatcagaagtgaattctctataaatcagccttgatgaaaaagaaaataagctagaaggctgggctcagtgactcacacctgtaatcccagcactttgggaggttaaagcaggaggatcgcttgaggccagagtttgagaccagcttgggtaacatagtgagatcccatctctaaagaaaaaggcaaccaggcatagtggcacacacctgtagttctagctgctcgggaagctgaggtggaaggatcacttgaacccaggagttcaaggttacagtgagctattattgcaccactgcactccagcctgggtggcagagtgagaccctatctctaaatatatatatgtatatacacacatatatatacaagctagtaattcagatttttcttaaaacagaaatctggacttttatatgataaaatgacagctaatttgctttttaaaaaaaacaatgtgtgagcctctatttgaccaagacctaaactctgcttggttaagtgtccactatactcttgacgttcctcacttttgttgtcatagggatgcagttctttccacagaaaatcttgcctgcctttttctccctgttctttcttcccttttttctcccttttctttccatttctcttctttcatctatctttaccaagataattttccttctaatgaccttgttacccattccttcttctacacacttctttcctgaaatgctcctctgatcaatacttccctttcaacatccagttttattatccaactatagattctcttccaaagtcagtcttacattctaaaatccatttatttcttttcttcctcccttaactctcaagaaactctgagctaaacaaaatgcacaaaagcatctataatgccttctctaagtctacagcacgaggctacaaaccaaatgccatcagcagttagtcaggcaatattcttgacaatcgacagtgacaactgcaatgacaattgatacgtagcttccttgtagaagaaccaataggacatagtagttattgtgacaaattcaagaacccatcccttatctaaggtagagcaattgctaccagctcttcttaattttttaaatataagctggaaagtccggtttttttcttaaaagaagaaataaatcggaattttcatatgaaatatacaactaatttaccttctaaatacaatgggtagacctatattttcaacctttgatctatagcacatattgaattactctctaatcgattcaaacatacatacctcatcacaaaacctggaagagtgctaagcacattgtaggccctcaataaaagttgattgatgttgtaactgagtcaatggacttattcatactcttcacttagggaggaatttctggactgtttcagtgcttgggtaaggttaagaaatattaccttgactatgatgaaaataagggagatacaatcacttttttcttcctaaccagtggttttatacttcatttgttatcacctaaaccctatgattatgataaattagctttagtatgctgcacacaagctttagtgatttctttattcatgagtgactataggcctttaattaataaccaccgaaactgtattttactggtccatgtcttacatgtcaccaattggccagacttattcactctttccctgcgaaaacaccactaaatgtaatgactcgaatggtaggcttaacctccatgacagaattataacatgagaaaaaaaaaaacatgaaatttggaggcagacaaacctgagttcaaatcctagctatgacacttgttgtatattcttaagcaagtaataaacttcttgggggtctcatttttctcatctgtaaaatgggacaataaactccacttacaaagttgttatgaagagtatgaagagtaaataaataatataaaatgcttggcagttttcctggcccacagtggagaatacaaaatattagtagcaactccctttgcttactcactgtgtatctcagttcagaatgttttctctttttagctataaagtgggtcaactcatatttacctagtattcatagtattttaacttcctatatagtacttggaaacactaagaaaatttgccaggtttcaattataaaagtgagtagatgggcaaactaatttaacaaaaacacaattacacaatttacaggttggttcatttcctagccataaaacaatccaaagattccttgctataaaacaacactaatacacatttctaaaagtgttctgaagtgaaggtttttagtacaataacaaatttacaccaccggtagataaaaaatttgtgcatgtgtgtgtgcacatggacacacacacacacacacaccactggtggataaagggtcatcactctaaaaaagttaatttttttcctaagtatcagatatattcataattcaaggtttaatttcatgatagatgccaaagagaaatttattcttacattcaaaatacatgtattgaaactttgctttcaacttagatgaagtaacaaggactgaatttactcttccacctaaaacaaccaaatcacaggacaaaatataagaaacaacagtttttcaaaacactccacatcaaacaaaggacagtgattcctgagggatgggaaacaaataaggtgagccctgcaattggcccatctttctgccttgaaagagtgtcccaggccggagcacagaaaaggtgtcttagtctgttttgtgttactataacagaataccacaaactgggtaatttattttataaaggaactcatttctcacagttctggatgctggcaagtccacagtgaagggcttgcatatggtgaagacttttttgctgcatcatcccacagtagaaggcagaagggcaggacagaatgcatacggactttttaacgataaattctgtctttaaatcgtctctttcctgtcttattttactgtaagaagttaaaagtagccatgcacagcatggaggacttgctgtttagatatttctttcaccagatatcctagtccatcactcttaactttcacccttcataaagcctctgggcacggacactgttcagcccagttatttgctactttataacaagggtggcctttgctctagtttccaataccttgttcttcagttccatctgaaacctcatcagaatggcctttactgtccatatttctttcattatgctggtcacaaccacctaaataatctctaataagttccagactttctctcgtcttctctgtttttgagccctcaccaggattgcccttaatgcaccattcacagcaatccaagctttttctaccttgctacaccaaattcttccagcctctatccattatccagttcctaagccacttccacatttgtgggtatttctcatagcaacagccctacttctcagtaccaattttctgtcttagtccatattatgttgctataactgaataccacagattaagcaatttctaaagaaaagaaattcatttctcacagttccggaaactgggaagtccaaggtcaagaagagtgcatctggtgagggccttcttgctgagtcattccatggcagaaagcagaagagcaagagagcacacaggggaagggagcaaaactcatccttttatcaggaacttgctcctgcaataactaacccactcccataacaacaacattaattctttcatgagggcagagctaatgccctaatcatgacctaatcatcctcatgacctaatcatcccttgaaagtcccaactctcaatattgttacattggagattaagcttctaacacacaaactttagggaacacgttctagtcacagcagagagggaacacaggcagacccccagcagactccataagtagaaaaagtggagtgcaaaaatattagggcagctagagtttgcaagcagaatattagagaggagagggcttcacagagagggaacgctggaaagttctttagtcctccccatgtattcagcagaatactaatgtaaggaattgtaaggaaactgtgaagcctaggaaataaacacctaaaagacgaaggggaatcagtatgcaatatgcacacagtctgggaatagtacctctgtatacctcacactggtcctgcttctctagtcgaacacatacatacatatataaagaaacttgttacagggaattggcttatgtggttattagagttggttaagcagcttctgtaaggctgtgtctctgcatctgatatagagtccatagggaaagcagtcagtaagggaatgtcaggaaaagactatcacaagcaagctgaaaccctgtaatcgtgagctagtactccatgaggatagactgaaatccatgtctttttttgttgcctctgaccttagtggaatggtaattttttttttcttttttcttttttttgtttttttgagacaggctctggttctgtcaaccaggctagagcacagtggcacttatctcggctcagtgcaacctccacctcccagactcaagacatcctcccacctcagcctcctgagtagctgggaatagtggctcatgccaccatgcctggataattttttgtattttttatagatcggggtttcaccatgttgcccatcctggtatcaaactcctgagctcaagtggtctgcctgccacagcctcccaaagtgctgagattacaggtgtgagccaccacgcctggccagggctcttttttatggaactaaaaacacatacctggctcatgagtaaggaaaaggtgaagaaaaatccagggaagatagcgcagttgtaggctcagacactggtcatgtcattgaggtaagtcagctacaaaagtgcttctttccttccggtttccaaatcatgaaagattagttcttgtgatccacccaatctgtaaatacacaagaaaggaaagtctgtgaaatgtagttcagcctagccaagtttttatattataaagccatcatatagagagagaaaaaagaaaaaaaataagagtatcagtgaactatgaacaactttaattagccttaaatatgtgcaactggagtttccaaagtagaggagagaagagtgggacagaaaaattctaaggaataatggagaaaaatttttaaaatttgatgaaaattataactgagatcctagaagcttaatgacccttaaacacaggaaacataaaatctctacaccaaggcacataataatcaaattgctcaaattgttcaaaactagtgataaaggcaaaaatcttaaaagcagtcagagaaaaaaaaaattttacatacaagggaccaaagatacaatgacagcagatttctcattgtttacagacaatgtaaataagaagacagtggagccacaactttaaagttctgagaggaaaaaaaaaataggccaggcatgaatagtgcaagcctgtaatcctaacactttgggagtccaacagggaaggatcacttgagcctggagtttgagagcagcctgggcaaccaacctagcaagccccgtctctattagaaaacaacaacaacaattgtcaacatagaatcctatacccaacaaaaccagtctttcaaaaatgaaggttaaataaaaatatttcagacatgcaaaaactttaagaattcatcaccttcagacccacactacaaaaaataacaaaggaagttctgccagcagaaagaaaataacaccagataaaaaatatggatctacacaaaaaatgaaaagcactagaaatggtaactttttgggtaaattttttcctattaaacctcttaaaaagataattaaccattttaaacaaaataaaaatgatgtagtacaaaagtaaaatgtataacaacacaaaaggctgagaggaaagaagtagatgtacatgtttgtcaagttctaatactgtatgtaaagtggtacaaaatatatgtactaaacacatcctatgaacaggcatttttgggccctagttacaatgatgaaaacaatctaccccctctccttgaggaatttacctcctcctgtactctcccaagaagcttaatcagcttttacactgagcagaaaaactgcggggtaagacctctttttaaagtgaccttctttttaatgtttcagttctacgctggcaatgcattatggagtaaatgacataagatgcagccactattttaatgttaaagaaatatgtgcctgtaggtaagatatattgttatatactaccattaaagttcattctatggtcacaagaaaggactgaaggttccacctccaggtcaactgagattacaatcaacatctaaccaaaagtccccaatttcattcacaatgaagctctacaattaataatactcaaacacattttctaaacttatttcaataagattgaaattactcccatttaaacagatgtgattctaagaatgtctatttttagatgggagttgcataagttgccagaaatggatctggcaatgtcaaggttatgtctcactgaaaaacagacataatttaacctttgtggggggaaatacgctatcctgcatctaccctggagcagatggatatgtaagcatggatgtagggagagagtggcaatgggtgggcctttttgcttcaagcaccccaccatgcacatacttgtcctttcctaagggggtaatatatataaatcttgtggcagcaaaggggttttatttctgttgtttattctgtatccacctttcctggactattccagtgtaatcaagttgcataaattgactgacaccattccaagaaaaattttattgtaatgaaccaaagtgactagggctgtaatgagatttcacaagagtacaggatcacaggaaatgaaaagagaaacaccatatatattctgtagaaaaatgtataatgttctagcaactgccccaacctcacatcagaatcagtcacttccaagcattctcattgtacaactcctggaaaaggttttgaacaataaacttcatcttctgtgccatacactttagtaagtgcttgtgatacattttctgatgcactcattacaaaatcctataaggtataaattatgatgtccttttcacagaagactgaggcttagagaggtaaagttttcacagctactaatggctagacaagaatatgatgccagatctcacttttaagcctagacccttacattctatacaaagcataaataagccattggatccaagtgtattcaaatcatacattgcaccataagccactactgccccagaagtccacaaggaagataaattctcaagtgtcagtggtgaaggaaagaaaaataccacgattgtaggtcaagcttatgactgaaaccccaatgcagagctgttaggaaacctgggctggaacataaagccaaagattggaggcctctgaagccaaatccgtcccctaaccccaacttaactcatagaaccagctggctctatgggaggtgggaaactgaagagatgagaaagctccaagacacaggagataaaagggagaaaagaaggtggttaggtctgccccattgaacttccaggtatttgagaaaaggggataaaaagtgagatgcatttatgtacatgacctgtcaacatacaacagccttgtcctctagtaaatatgtccaatcgaatgtcccaagagcttacccctctgattagcaacactccatcatgaaaggagagtaagcagttttggggagaggtaattcaccatgggccctgagggtgcctccatgttcttattggtttgccaagaatgcaaggccctgaccacattttaccttggccttttctcagagttgtatttgcagggagcagccctgagggatgaggaaatatcgccccccaagacaagcttgttactgcttacaataaaagcaacagactccacaagcacagtgttcctctcctgtaatacaacccactgcatgtgtaggcatcaatcaagacccacctgtgttggacttgggtccaatccatgggtcttagatttgtgggcataggaaaccagcattaacactaagctctggctactgcttttgccatgagtaataaaggcctatctctaacgcaagagtctcagtttcagtacccatgaaactgtggcaagctaacctgttagcctgcaagtaggataaaaatctcagacccttcacagttcttgacagcaggagggtagaatgaaagggaagaaacttgaatgcaatactgtcccttccttgagactagaagttatgtggcatggccatgtatccacattccctcctaattaagatcaccagtggggagttactatgtcagggaaatttcctcgtacttattgagttagctccatttagtcttcaacctcgcaggcgttgaaattttcttattctgatatgttttataaattacatgttagcttggtttaactcttcttttagattcaaaagctctctgaaaataagaaaaactattgactctttaacatgtgcataatttttgtttctgttcaatattatactccgtggatactccacgtataatgtgctaattgtcagcatgttaatcatcatcactattaacgtttttaactaagagcctacaaatacagatcccattcacccaccttccttactcttttcccaggaaagtgggagagtacaaagcatatgatattaggaaacagccctaggttatgactttctcttctgtggatcttctgatccattctacagaaacattgactcaataatcatgtattttagacacagagatagcaactaaattgttttattcataccatgcacattattaaccacttgacaacacagttgtggccaggaaacgtaattttaaactctcagctacttaactctcatttaaagttgagatgtgagaaatactagttatgatcctcaaaggacattcattctttggggtttctctttgtaccttgtctcctggaaataccagtcaccttgactcatcacttgggaatagtgatttcccatttcactaattcagtaaagagaccctggggtcttcccaattgtgggagggcagaagctgtccgtagcgagatttggatatctgctcaaagtactaggcaaacattctttttgcccttcaatatgttcacattttcttttttttttttttttttttttgagacggagtctcgctctgtcgcccaggctggagtgcagtggcgggatctcggctcactgcaagctccgcctcccgggttcacgccattctcctgcctcagcctcccaagtagctgggactacaggcgcccgccactacgcccggctaattttttgtatttttagtagagacggggtttcaccgttttagccgggatggtctcgatctcctgacctcgtgatccgcccacctcagcctcccaaagtgctgggattacaggcgtgagccaccgcgcccggcctatgttcacattttcttacgattagatatgcaagatacaaagggcttgttttagggtacacactcaggagaagaaaaggctgcctggcctgcttttacatagatggccttaagccttcatgcaggctatgtggaagttctcttagcctcatgaaatccagcacagttcaggagattttacagtttggaggaaaagctttgtagtaataaccagaattatttaaactggaattttccttctacttatcgtctaccaaccagtctggagtcaggtttatcagtttgggttctttgaggagcagacatcaagatgggattcgatgtgcaagaaatttattgggggaaatgcctgtgaaggacagaaggaagaaaggttgaattagaagaatcttagacttcagcacaaatctaaggaagttcagccaggccaatggagagtccttgagccagagctgcctgtcagagaagttccacatctcccaagaacaggcctgctgtagcatctttgttgtgctcagtcactggctaggaatggctgatgggaagtgtggcctcaacgggatgcaatgctgaattcagagcatagcagctggggctattcatcagttatgcccactaacgcaggaaatctgaatggtgcattatcacatccaccacggtaggcagcctaaggatggatgaggacccaagtttccaaccagataatacatcctcatgaccagcagatataagaaacagctgcaaaaaacccaccattgccttcattgtgggcaaactgctagggatgcttccactacatcacagtgctccctttatgagggcccaagaataatacctcctgtggctcagggcctggcaaagctattcctcctgcgcaactggtatgttttcatcctgtagacaagattttctagctgacttcttctttgtcttaactatcagaaagttagaaccagacttggggttctaccttcagctttaggtgctttttaattattatcttctataattcctttactcagcacaactgttctctgtgagtgatctaaaatgcttttctgaattaagacaagaaataattaccttaacctaggctggtaccatttagaactaaaaatgctagattttaaatgcttcagtttattctttttatgataactttacacacaggccaaattctttcactctaaactagtgctatctagtagaaatagagcatgagccacatgtaattttaagtctttagtagctacattaaaaaggtaaaacgaaataggtgaaattaagacaatttagtctttggaagcctactgtatatcttctacttacatcacatcccaatttaaatcagctatactgcaagtactcaatggccacatgtggctagtggtttctgtactggacactgcaggtctaaacacaaagactatgaatcatgagagttagaagagccttaagaaccacaactgtatctaatctgtattcatattggctttgattaaagatttctgagctcctgggggtttcttttttctttctttttttttttttttctcactcctgaaggtttctgatgcaaacactaaatctaagaaaagtgagttctcctgacaggggtaatgaccatgaaaccctaagatttctggaatttttcttttaatttctctgtgtttgtagttttttcttcactggatcacctttggcttcttctgagaaataaagtaatataaaatactcatgtacatctactaagaaagaaaggaaacaaatagagatgcattatctagattacaaattatttagaaattagagtgttagagtattaacatagggcacaaaattgaactaataaaattactttaaagcacacttatttagatattttgatgctccttgttttggagccagctctaaactttacacctcaatttgggatacgaagagtgttttccatttgaaccagagctggaagaccacaaatgtggttagatttctgagagttaagaatttgatttttttttcaggcattaacctacaaaagccttcatttccacacctggtgcatagagtaatgcttaccttataaaatagctatgaagattaataatgttatatataagctttgtaacaggcaaacagtaagtactaaataaatggcacttatcatcattgttaattacaaaagattgtcaaatccaggtattcttaacctgcggtctgcagatccttggctcatggataaaactgcaggggtggagatccctaaaattggatggggaaagattatatctgcattttcattaacctctaagcaaaatttaccatttctttccattatgaataaaggcaacatcatagtgatagaaggacctgtcacttcgcaccaacagaagttacacatactttcatattaaatttctgatgttacggacatcacaaaatatctcttacatttatcagctttttgaaattatagtattagacctaatcttgctagatcttattagtgtattaataaagaaatacacgttattaatgtattttttaaatttcaatataattggtttcctttgtaatcctatgtactttgtgaacttaaaacttaacttctcattattctgagaagggattcagcagcttcacaggattgccatggcacacacaaaaaagttaagaatccctaaattttagtctatctctttgcttccagaaagccaaccaagtttgacaattgaacacacctgcctgagtgagccaattcccaaagtctcgggtttatttttctgtgcgtgacctgataggaagatattacggtctggtacatgactccatcaattaacctatttgctgagctcaccttcagcttatacctggcatctttcctgaattctctgttgggccttctgaggcacacaaaatgagctgacaagctgattttctggtatcttctgttcatacacacctggcccccactcgatgccaggcccaggattaagctgggcagtgattctcaagcctgatcccagaccagcaggcaggatcagcatcaccaaggagcttatgagaattgcagattttcaggtcacaccctagacttcctgaaacagaaactctggggtctatcagtgttttctcaagccctccagagacacacgctttagtctgagatccaccgtgctagggaatcggaggtccgtccaatcctggaaagagaggctcccatctccagtattggttgagactaacaccgctcctgcaactggggttggaatttcaatgcaggtagttgctgagcgggggccaatgagttgaaagccggagcaaggggacttgttttgttcctgcaccccgattttacttacattacccggggcctcgagggtgactcatagagattagccctgagcgtcgacccctcggcgccgccactgcacagcgagagaaggggagtcaagagagacgcttgagtcccttgactgtcctcccctacgagctctctgggaagagagccccagacctgcgaactctgggccgctctgcggccgcttgaacacttcgcgggtcttccgccccgcgctagaggacgcactccgtgacgggaattgcggtctcggccgcccccggcctcaggctttccgggctctgctgcctccagaaaactacaagtcccaggatgctcggcgcgggacggtcacgtgggaggggccgcgggcgcggctaaatagtctccatcggccattttgtgcgagaagccgcagcgccgcctcttctctcgcgccctcgcctcttcctccgcctcctccttcgcctcttcctgcctcctcccggcttccgccgccgccactccagcctaatcccaaccccagggcgaagcgttttcttatttatttccgttttctcgccactacagcctcctgacaaggtgatccgggcgggccccgcaggaattttatcccctcaccggcctcacactagtatcgcatgtccactatccagaacctccaatctttcggtaagatcccgtcgccgccgcctccctcccttgcccggcgcgcatctcggccttttgcccgcctggccaccgcccctaggggccccctttctgcccttcccgcacccctagtggggctttgtctcggcgcccagaaaatggcgacggggcccctggcgaccccttccccgaggacagcgccggactccgagccctcctctcggagccccggccgcgggccctgcgccaccccctgccccgtccttgacccggctctcgcctccgcttctgccccttgaaaccttggcgatcctatttcgtggactcctagatcggccctgctacttgcaaagggtatgccgggccagggaaaccagggatcggcgcccgttctctggcagctcctgggggcacttagggaaagatgcggatgcaagcctctgatctgtcactggccagtggttcagtcttctctgcttgcgtagcaatttgttaaattacgcctcttgatatatatgtaatctactttttttttggcaaggcacagttacggttaaatgattaaggtgggcgtattcgaatgtttatgttttcatcagaatgtaatcgagatgacgcacatttttatagcggctacaatattaaggttttctaaatctttttctcattagaggaccatattgaacgataacattatttatctataacagcgtttttctacaatggacatagctgttcaaatgtttctctttttgtgagagtatcttgggggttttattaatactccacccccatctccattcctaccggcaaaaacagcaaaggcactagaaccttcattgatgactgtctggattggtagtataatgtatttctggaaagtacttcttaaaaaatatttttctactttggattttttttttttttttatccattcgcagacccctttgctgatgcaactaagggtgacgacttactcccggcagggactgaggattacattcatataagaatccagcaacggaacggcagaaagacactgactactgttcagggcattgcagatgattatgacaaaaagaaacttgtgaaagctttcaaaaaggtaaagggattaggaagaaaggattagagttactgatgcacacctctgaactggattatgattcacacctttatatcggcgtggatgaaaataactagaccaagaaagttgttctcatttttgtaattaacatgtaaatatttagttattctcccagtgtggtctctcattttaaaagaagattcgcgttgcttttaaataaatttaaatgtgaaatatttagttcttgatgttacacataaaatcatttcctggtttacaaattaatttggaaggattgtggattataggagacaaaatctgtttctctaaatatgatctagcttactgaaatggctaattctgttcatacggtgaaataaaacctcatagtagttgactaaattttgttgtatatttatgcacttttccagaaatttgcctgtaatggtactgtgattgaacatcctgaatacggagaggttattcagcttcaaggtgaccaaagaaaaaacatctgccagtttctcttggaggtgagtgattgggtgctttatgtgtaaccttgagattgcttttaaaattgtatttaaaggcaacatgatttgttttctactaagtaaaaaatcatacgaatgaaggaaattaggtgaaataaagacatggtagttatttggaaagcaaagacctttatctggtttattttgtcattagagtattctgatcatttctttatatacacacacaggctatttcttggcatgtaaagtattcaaatacgtgttgaattgttggctatcagcagtgcatgccacagacaacagtgttgcagtaagctgttgatagtgattctttttaattactcttccatgttttcttaatgaatttttatatttctcagagttattttgctaaattagattttattttacaggttggcattgtaaaggaggaacagcttaaggttcatggattctaaaatgaacctaaatacgtggagaatttcttgaatagttttgttctctaaacccggtttggctgccttgtgaaatgattccctgcagtaaacggacttttcatttatttaatcattcaaacttccattcacatctgcatgattacagaaaacatggggtatgtagactagtaacacataagaaaattgcagtaagatggtaacaaaacctcatattgtctttacatgtttccaatggaaaatgttttgagtgtttattgttcagtttattacgtttcacttgattaaatttttttgttgttgtattaaaccatgtacgttgcagcttaacaataaaaaaaaatctatgaatctttgtgagcaattatgctcccaaatctaagcaagtaaaatacacattttgtctttcttaattggagttctctcattctgcatatattccttctgattagcttcagctgttacacccagcgcttagaggagaaccttatatccagtgctagagaacctttgttatttgtagcttgtgtttttcatgtactgatttaagaatagaagcaggagtagaaattcagccagagccactagtcatggcaaagcaagtaaaagttgtcaaagaatttatcagattgtagtattaaatgttgttaaagagtatgaagtttaacagtattagaacatagagttcttttctgtgttcttatcagttgttactgagttgccaacataagtctatccctaagtaccagatactgtaatagtcttgtgacataaagcatatttagtcacaggcacttccctgcaagtgtaggttgatggtatcactgccttacagatggaaaacactgggcctcaggttaatttcccaagagtgctagaaagtgacagggtgtcagcccagagattccagccaggaaatttcttttactacatcatgattttggtatgtgtttcaccaaagtgaaccagagccacagatgacaatgaccaggggtgatagtggtgtaagaaataaccaccagccacggtgtctcatgcctataatcccagcactttgggaggccaaggcgggcagatcacttgaggctgggagtttgagaccagccaggccaacatggtgaaactccatgtctactaaaaatgcaaaaaattagctggtgtgcacctgtagtcccagctgcttgaggctgaggcaccagaatctcttgaaactggaaggtgggggttgcagtgagccaaagtggcaccactgctctccagcctgggcaatagagcaagactctgtctcttaaaaatacatataatttgcagttcttaattaagagatttctgcagctcatcttcttgagttccaggctcctttctattaagtagtatttacttggttgcacgggccacgccactaaaaccatttagccgatgcaaagatgcatctgcatgggcaaactttttagcttactacagttgcatgaggatggtatggaaaaaaaaaaagtcttattttggggccagtgagccctaatgagcccttgcctatattttggtgatactgtttttgggaaaacaaaatcagcccccacaaagtttgcctcttaaagacactaagtaataataggtttgttattttctcacctcatccttcctccaatacagtaagacagacaagaagtatacagcagaatatagacccaaatttgataagcacatttctggaaaacatcaatacagtttgatgaagaagatcaagaagtttgggagaattttccaagttactaagaacctcctactttttcatctgtaatattgtatagtagcaccctgttgaggggtgctgtggaaatggtaaagcagaaatttatattaacagccacattcaagtgctgcctaaatagataacatctgctgagagctgagctagtgccaagaaaataatttacattagatgggaaagaaagcacccctcatcctgggacccatagacaagctctgtagtaatcacttcctgtgtgagtccaaagtgggtgggattaaaaggcttaaggaaaacttccctctggatttcatgaagagcacctttcctgattctcttcccttcagcctatgagttccagcacctgattggactttgaacttgtggggcagtcccaatctttagagcaagaaagagacgaggaggcattgtataactgtggaggaaagataacatgtcttagagatgcagcaaactggcagtagccaaactggatatctctctgtgtcttccatgttggaaggtcttgatctgcagtttctttagtggtttatacttcagggtgcacaatgcgtaataccaagtagaagacaaataggtttatccctagacttttaaacttggagacgccattaggaagttaagacctttggttgaatcatagcctggagtaaagtgctgccagcagcaatgtcctccacctttcagtcctggctctcctgaggccgaggaaaccccatggaagcagtctgatcaacctgcttaggaactcgagtaacaggaactgttctcttaaccattccagaaacggggtggctctgatcatatggaagggacagttctagtttcagtcatgatggcagttagccaaaataacttgagaaatatggagctgtaatgcaggcttctgtgtgtcacgtgtatgccaccagcctggctccacctaatggaatgggtaatgacagcttggaaaaaggcaacctcattcgaccacctccacacaccagctgcactgggtttctgaggactccccttaccaagccaaaggtccatttgggagagaaacaaaggcatgatcctgctgtactaaatccaagagagtcctcaattgtggactgtgatcacttgacaagcaagaggtagccaggtgacattgtgcttgtctgggatcaaagggccaagggaatcagctagaattaagcaggagcaaaattatataaagaggcctcagcattgaacactcttcacatagtcatgtaggcacttaactcctttttatctggataatggaagcatggaaaaaaaacccataaatcagaggattaggctatatttcttccttcctggaaaaccattcagagtggaattaatactgatgagaggagagaatgccagactcctccaatgttccttacccagcattattgtgttagatgactttagggattctctgagctacacgggagaacttaaaatggcaatttaaggctgggtgcggtggctcatgcctgtaatcccagcactttgggaggccaaggcaagcgaatcacctgaggtcaggattcgagaccagcctgaccaacatggagaaaccccatctctactaaaaatacaaaattagccaggtgttgtggtgcatgcctgtaatcccaactactcgggaggctgaggcaggagaatcacttgaacccaggaggcagaggttgtggtgagccgagatcgtgccattgcactccagcctgggcaacaagagtgaaactccgtctcaaaaaaaaaaaaaaaaaaaaaaaactgaaatggcaatttaaactcagcatcggcttgtgaggataccatcatgggtcaggtggcttacctggtaagtcatcagtctgattttgaacccaccacgggtagcagtagatctgctctggtatatagatagctctgcacctgtgaactgagggtgagggccctgatgctgcatgatgctggatctaggtgccttcatctcaaactagtgaacagcctacagacatttttcatgcaaaaagcaatgacatatagataggcaccattcgttcaaggcacaaaagaagcttaaagcccccacagggaatctaattgatctcaggcctcatgctcaggcttcaactgcagctccctgttctagtctagagggttttgaaggcctgaggtctatagaatggtccagaaggaggctagctttaaccccagagtttgtctccatgtgtcctttacccattcttaccagggtgccagaccccagaccccacatcccgagtccactggcaaggaacaacatactgtctggaaagtagagagagaactttttaaaaatgtttatttatttattcatttgtttatttttgagatggagtttcactcttgttgcccaggctggagtgcaatggcatgatctcagcccaccacaacctccacctcctgggttcaagtgattctcctgcctcagcctcccgtgtagctgggattacaggcatgcaccaccacgcccggctaattttgtatttttagtagaaacggggtttctccatgttggtcaggctggtctcgaatcccagcctcaggtgatccgcccacctctgcctcccaaagtactgggattacaagcgtgagtcaccgcacctggcgtttttatttttaaatttatttttcccttttaattttagttgacatgtaatatacatgtttgtgggatacaaagtgatattgcgatacatgtacacaatataaaatcaaatcagggcgattagcatatccatcacttcagacatttatcatttccttgtattgtgagtattttaaatcctcttttctaggttatccatgtcagcctaaattttgtggggaagacatcaccagacaaggatttggtagaaggtataattccttgaagtaagaaaaggccaacctgggcgcggtggctcacacctgtaatcccagcattttgggaagctgaagcaggtggatcatctgaggtcaggagttccagaccagcctggccaccatggtgaaacaccatctctattaaaaatacaaaaattagccaggtgtggtggcacactcaggaagctggggcaagcgaatcagttaaaccagggaggcggaggttgtagtgagccgagatcacatcactgtacccagcctgggcgacagagcaagactgtgtctcaaaattaaagttaaaaaaaaaaagaaaaaagaaaaagaaaaggcccacccccataaacatccactcttagtgcatcactgccattgacttgttaaaaaacgcagaaaagcttagcccaatactagcatcaggaagaatagtaaatgagtggccagacacactgaatgggaaccagtaacagcccacttggtagatgaagtatgtcgaaacgaaatatagggtacccagtgaatgatgctattacagaagaaattgaagggggacggatttctgtaagtatgcagtcctttatcacccccttgtggccacttaaacaactggaaggctcctagcagtttacatgcattataaaggtttaagttgcagtcatcattaaagcaccagctgacaggtttgattttgtcatcactcaaatgtgatccagaaattaatctagccaaacatttattattacaattcatataaatcaattgccatttttctttacctgggagagacaacaatgttttcatggtcttgccctggggatatataaagcacctcagctactatctaccacggtgctgttagaaggaatttaatttaaatgtaaacagagacttctgtttacagcctccagggaatgaatgattaagctagaaaacaatcaagactcctaaattgtcgcttgttgagaaacacagtctggaatttgcatacacacaccctaaatattcagtgctctcaatctaaaccactgtcttaggccaatacagaagttaatgtgcctttcacttatgaggttgcctaaaggctttagtctgggaaaagcagcgacaggattccttaaaactccttaatgccattccagtagacctgaagaacccagaacaggactcatttggaaaactaatcattaggaacgtactcacttgcagagcatctggcagatctcacctgcacaggtaggggagggctaatgagagctcagtagtaacctggaaatggtgctctagggatttggtcccacaggaatcaacagcagcatcaccagatgggcctctggttagagatccccacaagaggtgttaagaggtataacttaggaaactatctctttaacaacagatcctttgggcctttttacatttttatcaagcattgcccctcattttctcacttctcttacattaataataaaaatagctaattccttttcaacacttatattgtaggtcctgctctgagaattctacatgcatcagctcatataattcttttcacagacatcatgacccggcatagattccctggcttaccatcacaatcacaccccttgcaaatatcatctccccttgatcctttctccttttttttttttttaattcatttgacaaaaccccaatccaatccttgttcaacctaactatctgctccacaacagcacataacacctggagatagctggggggtgggggggtggggtagggaagatggcttttctttcttcctttccctttaccagtcccccctccatcctccactaagcaaggtgaaggcttggtcttatccgtcattgagatatttgaccgtcttcatttttccacctccaaatctaccctttggaggcaatgttgcatactctgtcttctttcccatacaaggcatgaagtacacttgctccacccatcaaaacaaacccctccatttgtgtcctgggtaccatctcctcttctccataaaataccactgtaattatctcctttcttctgaatcatcaatttcttcctctctactggatcattttcatcagatggaaacatctagtactgcccgtctttcaagtagaagaaaagaaaaccattgatctgacattcccttcagcaaacaaagaaagagcctgcttctttacccccaaactctttccccagtcggcctcatctaagtaaatggcactgccatccatagaattgctcaaacttaaaactttatctttgaattttcccttcctttactgcctttaccccgtcctatctaatggggtcttagtgtttctacttgcaaaatgtatcatatccatcctttcccctacccccaacttctgactagtacacctgacaagcaccattgttttgcacccggattactacagtagctctccggctggtcgtcttgcatccattcacaacacagaagcctgaggattctccaaaattcacgtgagattatgtcagttctctgcatgaaatcttccgaaggcttctcattgcacttaacattaactccaaacatattacagtggcttacaggatgccacatcacctgttccctgcctatcccttgttcttgccatctagcctctgactctccactacacgaccagacccactggtcttcaaccttaaagcatttacactacatgttcagttggtccagaatactctatcctgctccccatctcccttcttgtccctcaatttcagttcaaacctcatctgaagaaagccatctctgatcacccaatctaaataagcccctcaccacccatctccctcagcaccacccatctcagcaccctgtattttgttttctttataatacttatctttatttaacaacatcttgctcattgttttgctagtttaccttgcatctccctaccactaacatgtaaggtatacaagagatacttgtaggcgatgctgtctgtgcctcacccatatcccttggcactcacctttcccacacatgtgccctggatgctccaactgcaagcatctgtgtccaactgcaagcattgtttgagggcattccctggccccaggagcatgcaagggatggaaatacttgagactggggcaggatggaaataccaaggagttaacacctgccccctgcacccctcacactagcaaccttcaatcaatggcaggtggaaatagctatataattatcccagctcacttaccctcaggtaagaaaagcatggaagcatggtctatactgactcccaggatttcccagcaagattggacctcagttgccaataacagtaacctgtcaataaagtatcatttattggctcccttcccttcccttctctgtctcattttcccatacctccacctatgctttctgagatcacctcccaaataaactaccagcacttacatccttatcatagccttctggaggaacccaacttaagatacctttgtacctcccaatccagtttagatcggggtatgaaatacaataggtgctcaataaatatttgttgaacaaatgagtaaatctccctccctgtgaccaccactcaccctttgggaaattccagacttatctattatacgtaacgtatctgtgggtcattttccattttgaagatatttggagcctgtgtatctgaggtgggaagagaatagatatttgtaataggattgcttgaacataattatttctggtaagccctttccttactctttatttcatgcttctcccctggagtaggggaagaagaagggaattcagttccaggagaaaggaagctggaaaaatgaatgcctggaagggacatattctaccagggccttggaaagacttgggttctaggcccctttgccctttgctgatattttcctagtggcctagcttgcccagatgctggctgagacttagttatcttcttatcacatcattctacatatgcaagaagtatccatggggaaaaggatggattatttagttgaaggtgttaggaaatttggctcaataaagaaaaagctgggtccctactccataccacaaacactaatggattacaatggattaaagacctaattgtgaaaggcaaaactatataggttatcaaagaaacccagaaagatatgttgtgactgggacaaaaaataaggttaattggtcaaataagctgggtgcagtggctcacacctgtaatcccagtactttgtaaggcagaggcaagaagatggcttatagccaggagttctaggccagcctgggcaacaaagcaagacctcgtctctataaaaaaatttaaaaattagccaagcatagtgacacacacctgtagtcccagctatggggaagctgaggcaggaggattacttgagcccaggggtttgaaactgcagtaagctattatcacaccactacactccagcctgggtgacagagtgagaccctgtctctgaaaaaataatatggtaaaatatacataacataaaatttatcatcttgacttttttattgcatatcactcctttgttatactaaactagaaaaaaatgtagtacagttattctgaaaaagaatgctgggaccatgtgacagggcaaagcaagtagaacacgattaagaaatcaggcacagtgaaagacacatttggacatgctcaaggggcatttcactgccacaaaacaaggcaggggagggattctaaaatatacagcagaatgcacttctacccttagaagtcaaaaggcgtatcccatgttggtgtgaggattggcttactttctgatgaccatacatgggactaactatttcaactgccactagaaaccccaaagtggttgtgtgtatgtgtatgtgtgtgtgtgtgtgtgtgtgtgtatgtatataatatatatgtatatatatagtgtgtatatacatacacatacacacaaatatatgcacacacatacatatatagacaaaatttaagtttctgtgttgaattatgtgttaagtttgtgttgcatttacttttacaaacatatatgtacacatatgtgttgcaattatatataatatctgtattttatatagataaaaattatatatattatatctatattttatatatagatattatatatataaatatgtgtgaatgcaacacataaacttaattgaagattgatcccaaccttctaaagccagcttctgtggtgtcagggaggaaatagttgattttttttaacattactatgtaggttacatttatcttccactgaaatgactaaccccaccgcccaagtcagtgacctaaccacagaagggcacaggactggctcctggggtcaaataggcactcttgcttcattgcttcttgcttcttcattggtcatgccttagcatggttcctccctctccccttctcaagctggtccctagtaaacatagccctggcaaaacctagagttactaccactgaactctcttggctaagagaagccttccctcagtgtggactgagaacccatgccccagagacgctattccaatccagctgtatgaagggagtgggtgtaggagatacaatggctgaaaggaaaatggaagccactggtcccccatctgcagctacaacttaagatgactacggctgggcacggtggctcacagctgtaatctcagcactttgggaggctgagatgggtggatcacatgaggtcaggagtttgagaccagtctggccaacatggtgaaacttcatctctactaaaaatacaaaaattagctaggcatggtggcatattcctactgtcccagctactcgggaaactgaagcgggaggatcacttgaacctcagaggtggaggttgcagtcagctgagattgtgacactgcactccagcctggctgacaaagcgagaccccgtctcaaaaaaaaaaaaaaaaaaatgactatggtcagtgtgacatatgcagaagtgcagaggaagggatgggcagagagggcattccttgggacagtaatctatctgctggcctttatttcttgaccttgctcccaatagccatagcttccatggctttatgcacagtctcttcatccccccccgggaactacatgggcttggtgggcttcaagttcttgtccaatctatagacaatgggaataccagctggcaggtccagctgcatgaagcctcttcagagacaccctccagatgctcaacaatgccccgaaaactgttgccatcagctgcaatcagcacccatttcccctccttgatctaggagactatctcttctttctaaaagggcagagctatggcagtagtgtccttcagactttcacaggagggtagctgatcattctcactggtgttgccttagacgggatggttgggctccatcagaggtgatgagacatcataggagcacttccagatctttaccaaggcctcctcatgcttggcagcagcttctgctttattaaggccaattagaaccccatagtggcactcgttccaagtcctcattacaggcatccacatctggtcaatggcatccagcactgtgcagatggtccagatggctttttcttccactgtccaagccaccacgcctcacagaaaagtatcaggctgatcaacccagatccatctaggccactgccacaaggtctttttaaacagctttattgagatataattcacctagcaaaaaattcagctatttaaagtgtacagtccagtgtggttttagtatattcctaaagttgtacaacatcattacaatcagttgtggaatattttcatcaccccccaaagaaacgttgtacccattagcagtcattcctcattcacgtgttttcttctaggaatgtagttttaggtcttacatttaagtctttggtccagtctcaattaacttttgtgtattggtataaggtaggaatccaaattcatgcttgtacatgtagataaccagttattccagcaccatttgttaaaaacactagtctttcgcccattggatcatcctggcacccttattgaaaatcaattggccgtagatgagagtttatttctggacttgcaattctatttcattgatctgtttatgtatctttatgccaaaaccacactgtcttaattactgcaactttgtagtgagtttgaaattgggaatgtgagtcctctaactgttcttttccaagattgttttggcttgtccatgtctcttccagttcagctagttacaaagtatcattttgcctctcatctgaggctgtgtcctgtacataggtttttctcaggaaccttgtcgggaggtcttgaatcaggagtgactgaatgccctagccatcttcccagctcatggtatcccaatctcatctttataccaacgctataaactacctagcccaactatgtcactcaacctggctcctaaaatcccagcctgagccagagtccttctccccaaatgcctgagggcagagcagctccacgataaaacccaagtaagctccccgggtgtttgcagtctcacaatgattgggttttcctctgctaggaaaagagagagaatttaaaaatatgtaaacgtaaacaacatttattttgaaaatgttttctttttcttgtttttcttgctatgggtttctattaaatctaaattagtataagaatcctagaagaaagcctaggaaataccacgctggacatgggccttaggaaagaatttatgacaaagtcctcaaaagcaattgcaacaacaaaaaaaattgacaaatgagaggtaaagagcttctgcacagcagaggaaactgttagcagagtaaacagacaagacaacctacagaatggaagaaaatatttgcaaactatgcacccagcaaaggtctaatatccagaatctataagaaacttaaataattaaacacgcaaaaaacaacaacaacaaagaactgcattaaaaaatgggcaaaagacatgagaagacacttttcaaaagaagacatacaagtggccaacaaacatgacaaaatgctcaacgtcactaatcataagagaaatgcaaatcaaaaccacaatgagataccatcccaccgcagtcacaatggccattattaaaaagtcaaaaaacagcagatgttggtgaggctgtggagaaacgggaacacttataatactgttggtgggaatgtaaattagtttaactactgtggaaagcagtttggagatttaaaacagaactaccatttgactcagcaatcccattactgtatgttcattcaaaagcaagcaaatcattctaccgaaaagacacatacactcacatgttcactgcagcactattcacaatagcaaagtcatggaatcaacctaggtgcccatcaacagtggattggataaagaaaatgtggcatatatacaccatggaatactatggagccatataaaagaatgaaatcatgtcctttgcaacaacatggatgcagctggaggccattatcctaagaaaattaaagcaggaacagaaaaccaaataccacatgttctcacttataagtgggagctaaacatcaggtactcatggcataacgatggcagcaatagacactggggactactagagtagggaggaagggagaagggcaagggtcaaaaaactaactgttgggtactgtgctcagcacctgagtgacagaattatttgtaccccaaacttcagcatcacacagtatacccaggtcacaaacctgcacttgtaccccctgaatccaaaataaaagttgaataggaaaaaataaaataaaataaagttctgtaatgatactttaacacaaactttttctgtaaatattaatagtaaatattttaggctcacaggttgtatgatctctgctgcaaatactcaactctgccattgaagcaagaaactgccatagagtatataaatgaatgaatgtggctgtgttccaataaaactttatttatagacactaaaattgcaattttatataattttcagatgtcacaaaatactattcaccttttgattttttttcactaaccatttttaaatgggggataattcctttcttaactatagttaactatactttttggaccacatgaaaacaataggtaggacagaatttagtctgagatccacagttttctgaccctggatttaatgtgacacaggaatcatggcacttgaaggaaccacacactgaaccaagaacttttgattaagcagctcattccaattaaaatagtatttgcagcaccacagttggcctcaggttttaacctgaagcccctaaaagtaggttagcccagtaacagtggataaaagcctatttagagagacatttccaaagcatgccagagagagacctgagttagaggccacttggccttaaggtccttggatattttccccaggtggtcagggccatgttagtacctgtgtccgaggaccgaaattgcctccatggattccagagttgcaacacacatccttgttcaatttagagagggagagaaaaaaataaaacatcattcagaattgcctttttgacacaggcagtgttggtgtcatgaggactttttgctaaaaggcctagattctgtcctggctctgctgtcagctcctgtgaccaggagacgctctaagccctgactgcccagtcaaaatcctggtgctgttgatttctagctgtgccatattagaaatcaaaaagcctcagtttgttgatttctaacaaactgagagatacctccatttccatatatataaagtggagatatatctcccaagcctctgtttccatacctataaagtggagatgatgatgatagcctcagggactcattgtggggattttattgcatagtgctttgcacataatatgcatttaacaaatgttagcttttcattattacatatcaagggagaaaacattggtcatgctatctttatggaaatcaaagaggaaaggatatgaaaatgtgaaagggtgagatctaatgtggaatttcaatcgtctttttacaagcagagctgtggaaccctgggactaaccctttgtagttatagctccatttttttttttttggcaacttttctctttttttttttcttgatcagtgttgccagaggcttatcagtttttattctttcatcttttcaaaaaaccaacctctagctttagtgattcttcctattacatgcttattttctgttttattagtttcttcccttatgagttttcttcctcctactttctttgcatattctttttgtaacttctcaatttagttgcttagcccattaacttttaacttcttttcgaatgtaagcacgtaaggatgtaaatttcccttgcgcagcctgcagattttgatatttagtatttttgttaacattcacgtgcaaacattttcttttctttctttctttctttttttttagacggagtcccgctctgtcgctcaggctggagtgcagtggagcgatctcagctcactgcaagctccgcctgccgggttcacgccattttcctgcctctgcttcccgagtagctgggactacaggcgcccgccaccacgcccggctaattttttgtatttttagtagagacagggtttcaccgtgttagccaggacggtctcgatctcctgacctcatgatccgcccgcctcggcctcccaaagtgctgggattacaggcgtgagccaccgcgtccggcctacatacaaccattttctaatgcctgtttaataaggtgtcctccactccttggggagctctgtggtctatcgccctgctcaaagccttcagaaatacgcagtgctgttggcatcctcctcaaccttgttcgttttcactacttgtggcaaaactaattcaaatattacatgtggatataattaggtgttaactgatttccttgaagacagcattaactttccactttctcattatcttgggtgtttctatgcctcacagtgtggcagggatatttttactctgctttagttaaccgcaaatccacaggtgtgttttgtactttcactagttgaaaactggtagatgcagtactcacacatggccaagagatggtgctattgacccatttaggtccagcctttatgttttgtatgctgtagtcatctaatttgcttgcttgtctttgagtttgtttcagagaaaaggtccaacatcagaagagttgagaggttatatgatactggctaaactcttagatcctctaggcactcaagaaaaaaacataacaaataaaaactctggttttaaagatgcagagaaatgtctggcaatgcaccctcaggggacctctcattccagaagtctagaaacctcccagaaggaagaagcacttgctttcctgtgtccctatgtttgcgaaagctactcagccattccctggagaggtttctcttggtgcagtctctcagctgacgttttggatcacaaatgagcagtccgcacataactcaatttcaagagttaaaaatcttagcctttagttgggaacaattttccaacaaacaggatgtggaagtgatgttatctgagggaagacatggtgcctctgagctgttagacctttccaaactacacatatgcctggcctgtgttcacaagtatacacacacacacacacacacccgccccccccccacacacacactcattccccttctctctctcaagtgacctgatctccaatccctctgcagcctcctgagggcttcttattctttaatatgaatgagagtcaccaggcaagtttattaaaatgcagattccaactcaggaggcctggagtggcccaaggctctgcatttttaacaagctcccaggggataccggccatctgggtttgcaggccacattctgaggagtagaggttcgtggcagtgcagagtggcataatgacaggcatcaatgtggttgattcagagatgccccagtgttaccggatcaaacccagggtcgggctgcttattctcaaggcccagtaatgagatgcagatgaactgggagagaagagaatttatttctgtaaccgggtaggcagaccaacttaaaattacaaagctttccattgtttatataccttctaagctatatgtctatgtgtaagtgcattcatctaaagacataagtggttaacttctcctaatataactaaggtctgagttttgaagacctttctctggagcctcagtaaatttacttaatctagatggctccaggtgccggagtgattacccttatctcgtctcctgctaaatcatggaggtttgaggagttcctttagaccatcctccccacccccctgcccagtaaaacttgtttgtggaggtctggggagtttcttcagacccccaataaaacttgtttaatcctacatgggtcctgttaagaattccttcgttatcgtgtcaggcttcaaggcccaggaaaggcctaggcaaaactcttggtgggctttgttacattccagcctttgcataaggagactggctctattagcttttaatatttaacctaaccactcagtcagtgccgcaacagttgtcatggaggcttgcctgttcagctgttagtgagacctggcctgccatgccaggactcagaatcagaagccctggattcagattcgggctctaccactttccagctttatggcctgatcaagccaaagccagccagtctctcacagcctcagttttctcagcagcaacttaaggataattgtgcctcggatcagaatgactattctcggcacaaaatgagatgatgtgtatggcatcaaattcaatgccttgccatagaaagtgcttggttatgctttttaggaaatgtgagacttacgcataaaatggcaatgtgaatactggagttgaacacctggagctacttctagtgcctcatggaaatgacctatggaatcattttctaaacttccttgatcattaaaattaccaggacactgtgaaaaacacaaactcttaagacctgtcatctcccagatcctgaactcgaatctctgtggaggagaggggcttacatttctaacaagtgctcagaaggattcgtgagatcaggcatgtttgaaacactagcctacagaatataaaaatatggaaaaacctgccttcattctggaaactagaaaaaggtaccctgtatctgtctgaaacagcagcatttttctgttatctatcataaggatggggccaaaggcagcctagaaagacagctccaacactctagtgaaagatggaagtaggagaaagtggggaagaccagtcaccaaacagacccctacaaagcccttgactcagagggctgcaggcaggcctggaggggcctccaggcttccatccaaggggtatctgcactcctggaaggcagggagtggggcttcctgcttggcaacaggggaaaccacatgcactgaaaccctcatctggggtctgcttctcctgggaggatgaatatagggaggaaaatcagcaggatcacgaagacattacaatgttgtgcacaccaaaatttaacataagaattcccttccctctagcaattcacttctgggaatttatgacaagtaaacaatcaagccgtgggacaaaattgaatgcattcagatgttcaatgcactattgtttataacactgaaaattttgaaacaacaggagaatggttaaatcaatgagaactgaaaaggatttaggcaggcaaagagtgggaggtggcaagcttcagaaggagggcttggcaaacgcaaagtcttcccgtgagaaagcagtggacctgagtgattggagcacaggatggggacataggttggcatgagaggagtgaagctgagaagcaagccaattagacagggcctcacagaccatggcaagatgcatgaatgctatctgagggcattgatgagttccaagcatgggagcagaacaattggatttattctaagaagctgattatggctgttagtcagagagaggaacgtacagaaagcaagagcagaggcgaaaaggccaatgagaggctactacacgtggaatgatggtggtaaagaggcagagaagtgggtggacaagagactcgcttggagatagaattaacaggacttgctgttgtgttggccataagtggcaaggaaaagatgacttccaggattttatctttggaaattgggtggctgggagtgacattattaaaatgagggaggctggggtagaaagacaggattgaggagtggaaacaagaattccattttgaacatgttgaatttttttttttttaatagagacagggtctcactatgttgcccaactggtcttaaaatcctgggctcaaatgttcctcccacctcaacctcccaaagtgctgggattacaggtgtgagacatcacacctaccctgaacatgttaagttttaaatgcctaagagacatccaatcagagatgtcaagcaactagttggatttgtaagtctggagctcagagaagacataaattcaggaggtatcagcccatagaatatttttaaagccatgaatgaatgagtttctttaggaatgtataaagagggcccagaagaaatccatatggaacactaaaaacgctagttttgaagaagtatatctggtgtgacatcattttggttaaaaaacaaagccccaaaattccatcataacataaacgcagaagatatctgcataaataaatattcatctaacggtttatgggggttatctctggatagttgggagcaaaacgctcattgacacccatgaaagtcaggtctatgcccaagaacctttttgcacctggtctttcccaaatggctgcttaagggacccaggaggaggagcctggaagttatggtgcccgatttgatgatgaacctaggagaagccactctgcatttgttacccaagggaataggaggaatgggagggctttcattttctcagttgtatatttctgtcaacattaaaacttttataaagaacatcattattacttttgtagatagagaaaaacaataaataaaattattttaaatggtggcatccattgttggtgaagccactgtacagtggaaacgcacatctctttggagaaaatgtgaattggtatgactttctgaaatgacatttgaatgaatttgaatgaatttcatgcaaatgaaattttatgtcaagctccttaaaatgttcatatcttttcacattcaggcacctatgctagggaaataatcagagatgggtgttaggaaccatggaaagatttcagtagttttaagataacaatttggcctgggtccatgaaccctacaaatgcccccaacttggctgggtccagccatcccttatctccataacatctttaagggagctgtacacacaaggaacaaggaatgtatgggacaccaaatgaccactgacgattccctacctcatgtctgcacctttgcctgcagaactccatggagtgcgtgcttcttagcccaaggccccagggaagtttctcccaagcccagtttctggatgaatacacatgaaatggtgaggtggctgagtccactctggaagaccgggcctccttgcgtggttgagaggagaacatcagagacagggaccatgctcaaatgcaccagcttttaataactgggtttggtaccatggcttgtcaccccactccaccccaaccaccagaataaaaacgtattattagactctagcagaggccgactcaccctgaaacaaacacactgggactttctggtgcctcgcctgtccaggcctcctccttgcccctgagcctagtattgcattcattcatatgcttttattcctttcttaaagggggtctctaaaactgcataagtctcaggtcccagcagactgggatgttcttgctttcagaaatttgagatgggaaataagaaaataatccagccgttggtggtaggagctgcagctgtctgaaaggagggatcatgagggaccctgaggagagcagagcaatgagcacgccagagatttgtttcagctggccttgtgagagcactaggcctggagagtgaaaaggaagatgcaagtgccggcagagctgcggtgttgcggggaggagtgaatgagtgagtgtgatgatgcatgactgcctgagcttgcactctgcacagtgagtgcttgctgaacttcgtcggtatagttattgttagcactgctgatattactgtgaaggtccgcgcactccatttcctggggtccttggagcctggttctgctctggataaaatggtcagggaagtctaacacgcagctctgagtacaccccctgaaggggacagaagctgagaaattgaccctcctccacttcacacgtacaccagaatagggagaccacgggacaaagcgctcattgacacccatgaaagttaggtctgtccccaagaacgcctttccacctggtctttcccagatggctgcttgaagggctcaggaggaggagcctgcaagtcatggtaaccgatttgatgatgaacctatgagaagccactcgcatttgctaccccaggccacccacattggtgttctttgtttctactactagtttacaacatctttctattctactgccagggaggaaaaaaggtgttccacaaaactgcccaagaggacatacctaggaggagcgtctgacatcagcggggatctttgtgctgccctttcaaaccctcgcctcactaattacccagcaggagacagccagctccatccatattggagtttcacctttaattaaactttaattcactcatgccttatccttgtggccacatgctgctgggaatcagtgccacagcaacttggacccaggccagaaccttgcagaagaacacccagaggcatcaccaagtaaaaatagactttcctgactattaaatccaacactgtactcagggaaccaacaagagtgctctcaaggaaagctgtgatctgcctataggcaaagaatggatgatttcagtaattcctcccctcccctccccgccccaactacacagggagactcaaacaaactaggattatacaattacccatttaacttcatctcatttccgataagaagtaatcaggggaagcataagaaaaccaagaacttccaaccactcacatttatgaagtgctaactccgtgccaggcatgatggggaaatgagatgaaatcagctttctgtagacattgtcagggccctgcctactgtgcacctggcagtcacctacagttcccacaggcccacagcttcctaccctacacatctgcatgtctctgacaggccattctctggctgtgggcatgtgcggcaagtcagcaggactgcccggaagtgccagggagttaatgctccaggagtggttccaatgagggacaggagctggtggacaaacaccccagcttcctcaactattggttccacttcttctctcagaatgtctctcagaaggtcccccaggagggagccccaggtgactgccctagcctccagctcattaattcaccttgtattggctttcattcttctctgactcacttcccttctctctcaccaagcttttaggaatcacttttcagataaactacttgcacccaatcctagtctcagtgtcagcttttggaggaacactaacgaagacacaattttagtcttaaccttgatgataatgacacaagttaactttaataaacgtgaaggcctaaaactcaaatatccataagccaaaagccaatgtgatcaaatatctaaggccaaacccaagtggggcctaaggggccctggagagcaggtatcctctttgggaggtagctactagtctactcaagaggctgtttccatgcaagaaggtggggccagtattgttagagcttccaatttttaaagagatgctggaattctgcatttttatatggactttcccaatttttgaatgttgaaatcaactcaaaaatttgaaagcactatgaagcccaagagaaatccatccatggacaagagcatgcccacagaccccagtttgtgacctctggttccactggatttaataatccagcagccactgttgacccttcccagggcagtttaaattgagtagtgaggccagaaagcatattgtggagagctgagaaaagaattggaagtgagaaaatagagaaagccagtatagatgattctttccagagcagagatagagtagtagatattgaagtgaaataaatattttaattcttaaagtttgggcactcaaaaatacctttaaaccaggaggcaagatcaaggattaaagaacaggatgaagacagtggagagacagggagtaaccaattgagtaaagtccctcagcgaaggcaagaacaggcgggctagctgtgggattggccttcaacatgaggaaagcctaccattctctgaaatgtggggcagaagatacatgacacactaaggtaaagaatctctaaagtatcctaaggcagagcagctcattaaaaaaaaaaaaaaaaattttcgggcatggtagctcactcccgtaatcccagcactttgggaggccaaggcaggtgaatcatttgaggtcaggagttcaagaccagcttggccaacatggtgagaccccatctctactaaaaatataaaaattatctaggcatgatggcacatgcctgtaatcccagctacttgggaggctgaggcaggagaatggcttgaatcccagaggcggcggttgcagtgagccgagattgcaccactgcactccagcctgggcaacagagtgaaactctgtctcaaaaaaaaaaattgactaggtatttttatttttattttattatctaattataaaattaatatgtgtttattttggaaatgttggaaaatatagaaaataataaagatgaaattaaacatttcctgttattccacatcctagaaagaactgttgctggaaaagggatattgattccaggccccaagagagggttcttagatctcacacaagaaggaattcaaggcacatcgcagagtgcagtgagaagagatagtttattgaaagctactcagttacagagtagggcatcctcagaaagcaagaagaagactgccttgtcttttttttgaagttttacttatatagggtctagtctatgtaaaagctaagctaaggtatgtctacatgcaggtgggctgacagcatagcaaaatttattactctgtttagttaaagaaaactatccttctataatcccagcactttgataggccaaggcaggaggatcggttgagcccaggagtttgagaccagcctgggcaatatagtgagaccctgtctctaaaaaaagagaaagaaagaaaaataaaaaataaaacgatccttgacattttagtgtgcaattacatcaaagcataattatcttgaaagcatatatggtcatgggtattgggacatctggactttccattgttgtaggagtgtgtccttgcaggtatctttaaactgtttcctcaatggtgaatatcttatgactatgtgtcatgacccacaaggaatgtgtcttgttagtcccaagagggagctgatattaaaattatgttactgtggctctcctgggctcctgtttccctaacagaaccactgttagtatttgtgactatatgtttttcattcaaagtgggcttatactatacatactgctttgtaaactgactttttaattttgtaacatataatggacatttttccacaccattagatattgttttaagatatgactagttacagtcacaccgtattttccaaatatacccacatccacatatctgccatccacatgctcttcttacagtgtgacattcacgtgcttccatcaagaagtgaggtctctgtttcctccctttgaacctggccagacttttgtaactgccacagtcaatagaatgtggcataagtgatgctgtgtgccttccaaggctagttcataaagacaacatggctctgttttttactttttgttttttgcctttggaaccaaaccacatttgtgaggaagtcaggtctatatggaaaggccatatgtgaatgttccagctgactgacccacttgggcctctagctcatatcagcatctgccaacacgtgagcaaacaagtcttccaagatagcagactttaggtcttccacttaaagccccaggcattacagagtagaaataggccttactccctgctgcctaagttcctgatcacaaattccgtgagagatagtaagtgatcattgctagagaaccaaagcagtattgcatttcatggatatatcacaatattgcccttttggggggctttagattgtctctaattttctgctattataaataacactgaatgaacctccacgtagctgattctttgtctaattaacatctctttcctaagaataaatgtatagatgagcaataattaggtcaaaggatatgatcattttaaaggctttggaaacacattgctcaattgctttctagaattgttgagtcaatttacattctcacaattagtgtatgaaagtgtgtgaaagcattcagtgagttattcttagtcactggcctctgacgactttacatttcttttcctcgaactgtcatccccaccccatctttgttaatttttgaggcttgtgattctggagattggcaacaaattagtggataccatgttgggagttgttcagggcaaggaatagatggaaactgctggtagtgggccatggggccaggcagctttgctcagaacagggatccaaggagggctatcaaggttgatcacaccacaaaccagaggctcctcctacccagactggatgacgcctgggatagaagctccaactgcagcactaagcccaggaaatacacctgtccctgccgtgctccttaagagggttgataatagacgtagggataccctttcttgtcatttgttgtttttgttgagataaaattcacatatcataacatgagccgtttaaaggaaacagttcagcggcatttaatagtcacaatattgtacaaccactgcatctatctagtttcaaaacatttcattgccccaaagggaaaccccatacccattaggcagttactccccatacccttccttccagtgcctagcaaccagcaatctgttttctgtctctatgaattgatctattctgggtatttcatataaatagaatcatgcaatatgtgaccttttgtgcctggcttttgaggtttatccactttgtgcacgtatacatccttcctttctcctattatttctgaataatattccattatatggatataccacaatttgtttgtccattcatcatcatttatgaacatttaggttgtttctaatattttttaaccaaaacatgtgtattagaactttcccacagatagccatttttgtcacttttctggtcaaatcttcacaataagttcttagactcaattattattattatttgagatggcatcttgctctgtcacacaggctagagtgcagtggcgcaatctcggctcactgcaacctctgcctcctgggttcaagcacttctgcctcagcctcctgagtagctgggactacaggtgtgtgccaccatggccagctaatttttatatttttagtagagacaggatttcaccatgttggccaggctggtctcgaactcctgacctcaggtgatccgtccacctcagcctcccaaagtgctgggattacaggcataagccaccgcgcctggcctctgagactcaattattaaggaatattcatcactctataactcacccctgaaaatcacttgattccttaatgaagcccttctttaactcgacctggaatcaatttctctcgtttactttaaaagcaaaacaaaaacctttccactgagtctatcaggcaactttacaggaaatcaaagcattttttgatagcacaggccttaaaagaagatattcaaatggagttgagacaaaccagattgttctagaaggcatttctgatttctttagcgaaatctgggccaaagaaatggtcactaacacgctcctttgtacttccacatagtttaatacattaagcactcaactaaaaagggagaagaagccaggcatttgagtgttagtgcaaagaagccaaagaaagaatcagtggcaccaactttctctacccagtctgtttttccaccacaggactcttgttataacgaacaatgtacgtagtgtgaagaggacggtaccttgatacccctcttttcctgtaatgaaactgctgccaccctgttcttcatgttcagttgttggatccatgtgggaactcagtgggctgtggctgacatattagaattgtggggttgtggctctttcactgtattgtctcctaagccttactctagtgggaagctaaatggagttggctccactagtttatcttacttaggaagaaaagttcattaaagcttttttatggccaaatctcgatgaccagttctaggtttttatgttttgggggtgattttccttttcttgatctatttagcaatttaaaccaaatctacctaagcacattccatataactcctacttctttttctctgaggtaaacataagaaagtttgctttaggattctgtgcagtattttctggtcccagaggtcaagtagaatattttgaactggacaaggggttttcagatactgctcaaagatgcagatatcatcagataaaatacctgaagacatgcaccctcccctgcgtaagtatctctcattcagcaggaaaaatcaggtttcataggtaagctgtcttctctcctccccagctgtttgggatgtaggctgttagttacagggatgggggtaggttgaatgagaaaatattttgcaatgtagatagaagcatgtattattagtccagactgttttgatcacatgtgccagaaacacaacacaaattaacttaagcataacaagacagtttatatgttcattaaactaaagattcacagttatagctgtcttcagtcacacctgaatctaggagctcaaatgatgccctcagctctgccttcctcagtattgtcttcactgttaggcagtgactggggtaaggtcagccccagctgaaccaaaagacagagaggggtggttgcccagaataaaagctaaaatttcaggatagacaaaaacaagatattctatcacagagggtcctatactgtgcatctttatcaaagtgactccataaatcttgacctgagataccacatagcttgatctcatgatgtctcttgctatagactgaatgcttgtgtctccccaccccaaaattcatgtgttgaaatcccaattcccaatttgatagtattaggaggtgggggcatttgaggggtgattaggtcatgagggtggaaccctcacgaatgggattggcacccttacaaaagagattccaaagggctcccatatcgcttctgccatgtggggacacagtgagaagatatcatctatgaatcaagacaccagccctcaccagataatcctgaatctgctagctccttgaccttggacttctagcttccagaactgtgagaaatgaatttctgttctttataagtcagtctatggtgattcattatagcagcctgaactaagacacctcttgagcatctgttatgtgccatgcattgtgctaagtgctgagtgctaggaacactgatgagcaaaatagacactctctctgccctcatagagtttgcattttaagggcaatatacttttttatgattctagccagactagtccctgtcttcttcatgaattcccacacaacaattggtgcagggaatgtcataggccagattgcctccaggcagagactgagatgacaaggattagatacatatgatttatggagggagtgttcttagaagaaaggtgagaaaaagaaataggatggagggagaagagctaagcacgaaattgggctcagctggtgtcagcctctgcctatctcatgggaagctctgagcatgaattgtactacagggttagtcccagcttgaggcaagagggtggaccttgtgtgccccaatgtcagtcactcaatggctgtgggctgccctggatgggctgagggtgaaatattccaggccagatggctcctgttctgccagggcaattctgtgatgggggcagctgtaagccatcagtcaccaacactctcagcaactgggtgggtccactggccttgggaaaggcattttggtgggacaccacaatctcactacagagaagatgatgttggtcacatttttcattaggtaatgtataatttctgtctatgtattggatagcagcttttactcaatttgttttccagttattcaattacttaagtgatatgaccagaaagcaaaataatagcaattatagtaatatagggagataaatataaactctctttaagacttccctaggccatcatggctcatgcctgtaatcccagcactctgcgaggccaaggtgggtgggtcatttgaggtcgggagttcaagaccagcttggccaacatggtgagaccccacccatctctattaaaaatacaaaaattagccgggcgtggtggcacatgtctgtaattccagctactagggaggatgaggcaggagaatcgcttgaacctgggaggtggaggttgcagtgagccgagatcgcaccactgtatactgcactccagcctgggagatggagtgaaactccatctcaaaaaaaaaaaaaaaaaaaagactgctctagtaccttggtgaccattttaggccaaaaaacaaataataataatattattattataataaattaaagccacattgtaagctgaatctttctcaacaatgcctggggtttgtcagaaacattaagagaatgagctgaatgctgtaaattgtgcttagcaactggagagtgccacatctaccaggaaacctttgcttcctaaaaatggaagcattatctggtgaaatcaggacaattacagccactaatcatttgtaactgaaagcctgtaactgaataaaataggagttgaaaactccaaatctaatttgtctgtaatggacaaaagattatgtctattaggacatccatttcagataaaaaatgagcagtattgctcaaagtcttatgcttctattttaagatggacttgtttattaggaattgcagttttgttgacctcaataactttacgggaattatgaagatgtggaacatcaaccgactcatgtagggagggaagaactggaagccttgggacccagagtcagcagatgccctgaagtcaggttggaggtctgcatccactgtgagaaatggcccagctagattttgtgttgaggaactgaaatgaatacccacacacgtgtgtgtgaacacacatacacatacagcttactgtctacactaacatgaccttgcttttctatcatattcatttgcactactttgccatgctaggagattccagtgcaggaaaataacttgaaagttcatcatcctgaaaaatacctcataagaagcatcaacagatagcttacttcctaagattctccaatcccatcacctcaaaatccttaccatcctgtttccaccaattgtaaaccattagtcatgatccttattcaatcttaatcaagtatctcattgaaagacctaattttgtttgtttgttttgagacagggtctcactctgtcgcccaggctggagtgcagtggcgcaaccttggctcactgtaacctctgcctcctgggctcaagtgattcttgtgtcccagcctccggagttgcagggattacaggcaccctccagcatgcctggctaatttttgtatttttagtagagatggagtttcgccatgttggccagactggtctcgcactcctgacctcagttgatccactcacctcagcctctcaaattgttgggattacaggcgtgagccaccgcacttggccatgatttaaatgaaacccaattctcaataaaatccagctttgtctttgcttcttgaagacagccaaagctctgttgcagtggtgttcttccttaccacagaaaacaatctactcaaaattgccttatcaataggttgcactggtgacactggggggctttcattcaacggtatttaatgctatagctcttctcaggcataaatcttagtgcttgcttctccagcatcctcagtctcttacttcagggccatttcttgagtccctgcttcttttgttttccattacgctaaattcactcaaggaatacccaaaagggacataaatacattttaataggtagaaaaattatatgtgaaactttatgtacctaacattaaagttttaaaatataaaaaacaaaaatgatacatatacaaagaacaaatagacaaatctacaatctctgtgagaaaatttaaaatatcagaaattgacagagtaggctgctttgcctatggagtagccattcttttattccttttcttttttcctttttatttttatttttttttgagatggagtcttgctctgtcacccaggctggagtgcagtggcacgatcttggctcactgcaagctctgcctcccaggttcacgccattctccttccttagcctcccgagtagctgggaccacaggcgcccgccaccataccatgcccggctaattttttgtagttttagtagagacggggtttcaccgtgttagccaggatggtctcaatctcctgaccttgtgatccacccgcctcggcctcccaaagtgctgggattacaggcgtgagccaccgcgcgcccagctcctttcctttcttaataaacttgctttcactttactctatggactcaccccaaattccttcctgcacaaagtccaagaaccctctcttggggtctggattgggacccctttccagtaacttcttcctggcaatccacaaagggattatactgaggagatccccgaccgaaaggtaagagactgtagcaccatttggctgactttgtataagtggtgggatatattttacctggctaaaggatgggattgtgttaaaggcccaatttagaggagttagagtctctcctaagacagagtgggttaaaagcccctcttttttttttggcagagttttgctctgtcacccaggctggagtgcagtggcacaatctctgttcactgcaacctctgcctcccgggcttaagtgattccccacttcagcctcctgagtagctgggatgacaggtgtgccaccactcccagctaattttttgtatttttaaaagagagaggattttgctatgttggccaggctggtcttgaactcctgacctcaagtgatccacccgtcttgacctctcaaagtgctgagtttacaggcatgagccagcaggcccaggcaaacaccctcttaataaaaagcaaggatgcttgaccgaacttgggttgaaggcccaacttaggaaggttaggagtcctatctaaaattaagggggttagaggcccctctcaataaagtccctcttggtaaaaaatggatttggcactatggggtgttaaccgctattctctttcgattaatctgccttggactctttgctgatggctatgggtgacagggttagacatgtagaggatcacaggacacagggagctttttcctcccaaaaaggggaaacttgagagctgatgggactgctggaaaaagatccctttgtgatagacaagcagctacctggacttttgattcagtgtcgtgggatgggcaggtctttctctggcctccctgagctcctggctttccccaccccactgcaggcaacgctgttctcctttccctttcctctttttctctgtgcaaacacattgtaggaatgataaaactgtttatctcccctgcaaagttttaattaatgggaaaaaaggatttgtggggctagtcttaagttgtagctaatctggtgtgttttgtgtgtctttctgtatcgttctgtcatattgttctgtaatatcttaggatagaacaccccttaggaccccataagccaactgttcaagccagcccaacaaactggtcagtaacaaactttgctgcaggtccctgaaacaaacaaacaaacaaacaaaactgattgaaatttctctcattttgttttatgtccttgggattttgaccttgtaacctacatggtggtactttctcttcgtctccaccatccagaggacaggaattttggagttcatgtcataaccttaaaaattatctcaagcagttaaaagtctttgaaagctcaaaattaactgctctagactccttctggaaagagcaatggaaactgcccaaagctgtagcttagtagctaaggctttcttttttcacattggcaacctgggttcaattttcagcttagggaatgagtcctttctgatttgatattcgtgtgacttttgccattcgtttattctcttcccctccatgaacaacttctgacttcctttcttgagtcttcctttctccaagcacctgtaaggttactttgggtaaagttcaaaagccggaaatattggcagtttggcctgcctgaagtcaggtaataagaaatttgattaaaagtcagcttaatttctgagggctctgttcttttccattggtctgtatctctgttttggtaccagtaccatgctgttttggttactgtagccttgtagtatagtttgaagtcaggtagtgtgatgcttccagctttgttcttttggcttaggattgacttggcaatgtgggctcttctttggttccatatgaactttaaagtagttttttccaattctgtgaagaaagtcattggtagcttgatggggatggcattgaatctataaattaccttgggcagtatggccattttcacaatattgattcttcctgtccatgagcatggaatgttcttccatttgtttgtatcctcttctatttcactgagcagtggtttgtagttctccttgaagaggtccttcacatccttcgtaagtcggattcctaggtattttattctgtttgaagcaattgtgaatgggagttcactcatgatttggctctctgtttgtctgttgttggtgtataagaatgcttgtgatttttgcacattgattttgtatcctgagactttgctgaagttgcttatccgcttaaggagattttgggctgagacgatggggttttctagatatacaatcatgtcatctgtaaacagggacaatttgacttcctcttttcctaattgaataccctttatttgtttctcctgcctgattgtcctggccagaacttccaacactatgttgaataggagtggtgagagagggcatccctgtcttgtgccacacatctacaactatctgatctttgacaaacctgacaaaaacaagaaatggggaaaggattccctatttaataaatggtgctgggaaaactggctagccatatgtagaaagctgaaactggatcccttccttacaccttatacaaaaattaattcaagatggattaaagacctaaatgttagacctaaaaccataaaagccctagaagaaaacctaggcaataccattcaggacataggcatgggcaaggacttcatgtctaaaacaccaaaagcaatggcaaaaaaagccaaagttgacagatgggatctaattaaactaaagagcttctgcacagcaaaagaaactaccatcagagtgaacaggcaacctacagaatgggagaaaatttttgcaatctattcatctgacaaagggctaatatccagaatctacaaagaaatcaaacaaatttacaagaaaaaaacaaccccatcaagtgggcgaaggatataacagacacttctcaaaagaagacatttatgcagccaacagacacatgaaaaaatgctcatcatcactggccatcagacaaatgcaaatcaaaaccacaatgagataccatctcacaccagttagaatggtgatcattaaaaagtcaggaaacaacaggtgctggagaggatgtggagaaataggaacacttttacactgttggtgggacagtcaactaattcaaccattgtggaagtcagtgtggcgattcctcagggatctagaactagaaataccatttgacccagccatcccattactgggtatatacccaaaggattataaaacatgctgctataaagacacatgcacacgtatgtttattgcggcactattcacaatagccaaagacttggaaccaatccaaatgtccaacaatgatagactggattaagaaaatgtggcacgtatacaccatggaatactatgcagccatataaaatgatgagttcatgtcctttgtagggacatggatgaagctggaaaccatcattctcagcaaactatcacaaggacaaaaaaccaaacaccacatgttctcactcatagatgggaattgaacaatgagaacacatggacacaggaaggggaacatcacacactggggcccgttgtggggtggggggagtggggagggatagcattaggagatatacctgatgtaaatgatgttaatgggtgcagcacaccaacatggcacatgtatacatatgcaacaaacctgcacgttgtgcacatgtaccctagaacttaaagtataataatatatatatgttttaaaaagacacaaaaacgacaagaaaaacactttcagtccaaaaaaaaagtcaacttaattaaaagtggatatccaagctatacgtacacttaaaaggcctttatgtttttttcccctacttagatattatttttctgaagaaaaaggtttttctcttctcagctgattgaattatttttttccattttgtcttcttgccactctctgtgcacacgtgagaggacttaagaaaaattataacagcctgggacttcttgggaaaaatagaggaggcaccacagaccccattttggggaaaaaaacccctctgttttcctcatgagaccccaggaattgaaagtggatagattcctgtcaaaatctaagtctctgttatgttttgcattgcattatctgacgtctttgacttttgggcgtatcagaaattacttcacattatgagagagctttggtgtgtaataactaggtaggaaatacacttttggggatagctaatggcatttataggggaatacacggctctgcccatttggatcagagaagcatgcttcttggccacctagaaggtatggaaatgtccccacctccactgagagataagactcccatggagatgggctgattccctcttttggggatccaggatctcatataaaaatgggacccttaattttgggagaatctgtgttgccttccagctgtacctgctaattgggccctagaaactgcatgttttaaagagaaacttaaaaactaaaactggcaaatgaaaagccttacaactactggatcttctgtctttctgtatatttatttattcttttttattttaattacttcccacactatgctgatgtaatttctgtgtatttatatgtgtgcatgtgatgtttatatatgacagagctctgattaattggcttaaaagtaataagtgcttacatcaaatattttgtcagaaaaacaaaaactgcaataccttttagttcatgtgactttgattatcttttcccaaagacagttttacagatattattagaaaaataaagacatttggtctaaattatgcagctattactaagaattagtcagatattaggtttgctaaatgatttaaggtcataaactgcttctttgacttttgaaaattgtccaacttacctgctttggagctattagattccaggtaaggcctgggaacatgtggagttagccatgccccctcgctatggtggaaagagtcagaccctatctgcactcctgtctgttgtcttaagctccacacctggtacataattagaatcacttactcaccaggtttttcaccaaaaataaaaattgctaagagttaacattgttatacgtaattgagactattgaagaaacaattttacacacaaggtgtgtaaggaaaataaaaatgtgtttttggtaaaagataagaaggcatgggaatgtggattttttggcctagattaaaaggttaaaggattgttttaagttaggataaaactgaaggtttcagcaagttgtgaaaggtttgtgaaagattaatcttgtaaaagaaattctgtatgtgaacatactggctaaatttaaagtcgtattattctgtttttccataaattgaacattggaataaaagcacaacagggtattcttagagcactgatctgctctttaacagaaaattgtaaagggtcataaaaggtttatgagaatcttaccttgtagtcaaactgattaagattggatagatttgtctatatggttttattaagaactggatttgacatcattagtgcactaatgcaaaggtgaaatttaggctttctctcaaacaagatttccatgtaatattaaaacaatgaagaatttttgtttgcctcttgaataaactgtaggaaaaagaaaggaaagataaaagattgtttggaaaactaactcttctctctattaatgagtaaaggtttttgcctttttaaaatttttgagttattattttggccaaataaatgacttatggcgacctgggatttgattttaaacaagcgttttaaacatttgatatttgacaaaatttccaaaatgaaattataaattatgtcttttctgacctagttaattctttagatgttaggtctcctaaagtccaaaaaagatatatttggcttatttggtataaaaatcacacaggaagcattgtcaagtatgaaatggtgcttggcttcctttgtgttgtatctgtataaatatgttactaataagtgttccaaaattacatgaaacttctataattctgatatggcttagtatatgttattaataattataattgttatataaaatggctgtatgccacagaagtaataaaaattcctaatcaattgtggtgttaataatggctgtccaaagacttttttgtcatctacagacaattgttgtcttattttgatcctcttcaaaggtagtttataatcacctatagaactttgataggtgcccttgagtgcaggtttctaataactttggagattgtgaaaatagaatagaggaaaaagttttcaggactctcatggagagctaaaatgttcatgaggcactgttcaggcagggtacagtgtctcatgcctgtaatcccagcactttgggaggccgagccaggaggatcacctgaggtcaggagttcaagaccagcctgaccaacatggcaaaacattgtctctagtaaaactacaaaagttagctgggcatggtgaaacacacctataattccagctactcagaggctgaggcacaagaatcgcttgaacctggaaggtggaagttacagtgagccaagatcacaccgctgcactccaacccgggcaactgagtgagactctgtctcaaaaaataagtatgtatgtaagtaagtaagtaagtaaataaataaataaataaatttaaaaagttcatgaagtcaaacagaacagtagttaactacatcaactgaactaatagaagactgaaataatcttcttgactgtttgcttaagatgttgctaatcctttgttttgtttttcagaacaagaaaaacttttattttgagctatttacagcttttaacaattgagtaaagtatactcctgtgaacaaaatttggacaatatttgtttctctctgcctgatttctcctcaatttggaaactgttagtgagtattcttaatttatggcaatatagttgtttgcataagtgcaataagaatgttttgcaacaggacaaattggagaaactggttattttaccaaggctttgactgaaatggctttctttcctttaagggatcaaacttgactcacagagccaataaaagtcccttgggaaaactggcctcataccttgtctacatagtccctgtgcagggttcctgatgtgataaataaaggatgtcactttctaacaggaccagaagccccaaaatatcttgagatctcaagagaagagaaatttacaattcacaggtatttgacagtacaaacccatggctgggctcagcttttagcaaagtcttatctgagattccttttatggaacaaagttatgccaaagccagttttgaaaggctatgtgaaaaataattattcttgctgccctttatacaaataatcagaccaagtataataaaccgaattggtcttaccatgatttgtctttagtaaaaatgggagactggggagagaaaaattatgtttcaaatactgtggtatacttgttattaaattctagtctcattggttgtttttgagttttttcttcaatttagactaatcctgcttattcctgtgaacaaatcagtgatctctggctgcagctcggaagaaacaaggggatgggtaatgtgaaaatctggatcagtattctaattctggtcacatgttggaattggctagcaaccccatatcagcttggttccaacagttgtgcagttcatggaaaccttcttacttagtttacttgagataattttacttattttgttttactgttgtggaatatattgctgttgtactctttgtgtaggaatgcaggatatgtttactgaatgttttctaaaattaaacacttactaatcatccagatatcaccttttgtcagacttatgaatggtcctcaccatactgatgctttctgactgagctcctctctaccctgaatacaagagaccctagcatttagacaggagtatcatcatccctattcagcctgaagaagttacagaaaatggatctttgttcctctacaacccttaggattaagagttcccttgtaaaaaggagggggaaaatatattagagatgtttgtaccagagggactccatgttgaatagggtctgggtaaagtgaggctggcacctacttggctgcactcccaggaggttaagcattcttagtcacaggttgagataggaggtcagcacaaggttcaggtcataaagaccttgctgataaaacagcatgttgtaaagaagccagccaaaactcaccaaaaccaagacggcaacaagaatgacctttggtcatcctcactgctcattatatgctaattataatgcattagcatgctaaaagacactcccatcagtgtcatgacagtttacaaatgccatggcaatgtcaggaagttaccatatatggcctaaaaaggggaggtaccctcagttccaggaactgtccacccctttcctgtaaaactcatgaataatccaccccttgtttagcacacaatcaagaagtaactataagtataatcagttgagcagcccttgctgctgctctacctatgtaatagccattcttttatttttttactttcttaataaacttactttcactttactctaaaaaaagaagaaattgacagagtagaaacaaataagaatatccaagattcaaataacaataaatacatcaaatatggctgggggcagtagctcacacctgtaatcccagcactttgggaggacaaggcaggtggattgcttgagttcaggagtttgagaccagcctgggcaacacggtgaaaccctgtctctacaacaactacaaaaaattagccaggcatggtggcgcatgcctgtagtcccagccactcaggaggctaaggtgggagaattgcttgagcctgggagacagaggttgcagtgagccaagatcgtgccattgcactccagcctgagtgatagagtgaaaccctgtctcaaaacaaacaacaacataacaaaatcaaatgctgtaccctcaaaacaaataatatgttccttctccttgatttcttttctacacttagcctccatgaccccatcctctcagctttccttccacttccttggtgcccctttctctgtcctctgccagttcctctcattcttccagacttatcatgtatgtttctcaaagcttagtcctgggcaattctatcccgtctctacagtcagcccttagtatccatgggtttggcatctatcattcaaccaaatgcagattgaaaatatttgtggaaaaaccatttaaaatagcaatacaacaataggccaggcatggtggctcacacctgtaatcccagcactttgggaggccaaagcggatggatcacctggggtcgagagtttgagaccagcctggccaacatggtgaaaccccttctctactaaaaatacaaaaattagccaggtatgatggtgggcgcctgtaatcctagctactcgggaggctgaggcaggagaatcgcttgaacccggaaggtggaggttgcagtgagctgagatcatgccactgcactccagcctgggtgacagagcaagattctgtctcaaaaataaaataaaatttaaaaaaacaataaaaataatacaaataaaaaccaatatagtataccaactatttatatagcatttacttgtataggtattataagtaatatagagatgatttaaactatgtagaaggatgtgtgtaggttttatgcagatactacaccatttacataagggacttgagcatccatggattttttgtatcacttgggggtcctggaaccaatccttccaagggatggcaatactcccttgacagccccatctagtctcttggctctaaatatcaactactggctgacagcttctaaatgtgtatctccgtcccagacctctcttctgaaccccacattcatggatccaattgtctacttaacatatctcagattcaacgtttttgaaattgaattgctaaattttatccccaacctgctccatccacagtcttccccatctcagtggatgacagctctagaaagtcactcaagccaaaaccttggtatgattcaggactcctctcttttattccccatacctaatctgtcaggaaaccctattggctctacctccaaaatatattccaaagccaaccacttttccccacctctactcctcccaccctggtccaagccaccttcatctcccaccaggacaatggcaataacatcctagccatctccctgctcccacatttgttcccctacagtcaattcttcacaaatccatctgtgtgagcacttcaaaaattaagtgagatcacactcctatgccaaaaactcattttactaagagtcaaagtccttaaagtccctcaaaaccatacaaggtcctgcaggaactgtacagacatgcagacacacacaaacagatacacatccctcctcttccctcacattccatattatcttttcaatgaagactactgtgatcattgtatgttaaattgcaatctgtacacccacactgcactccccatcccacttcccttcctctattattttggaaagcatttgccatcttccatagcacatgtaacattactttatagtttgcttatttattatgagtattgcttatcatttcctctcactgtaatgaaagcttcacaagggcagggatctttgttttgtttattgatggatcctaagaatctggatcagtgcctggcacacagtaggcactcaataaatgactgttgaatgattttttttatactaagatggaacataggaaattttggtcatgtatttggtcatgaagggaacattaacaaactgtaaaaagcacaaagtattagaacacatttaatgaccagagttcaatgtaattagaaattaacaaccaagtaacacttttcaaaaagctttccacttctatagtttgaaacagttttctgtgtcttttttttcttcctcccttctctctccttacctcatccggccctggcgcctcccacgaagcatctacctggattcccaggtgatgctccacagttcactcctccaggatgctctcatttctgagctgtaaggctgcagtggaagaggagcacctggaggatgtagtgtggggctgccactagccaataagcaaccacttacacacgaagtccggaccacagcctgtccatgagatgatagtccaaagaaggagaagactggggaggaaacggggtacagtatcttgtgtagggacaatgagtactttgtcactgatcgaagatgcagcctgccccaaagcaggcagtcatgccaagagtccaagcctagggacctgagttttccactggctgtgagcactggtccatctctgtgcaagttggttatgtggtccatgtgtctgtttcaagagtaactgtgaccatgggactcagatatgtgatgctcaccatcttcgctttcattttactttactgaatacacttcttaaattgaagtgtagcgtacattcagaaaaatgatcaaatcataagtgaatagctctctatggactgaattgtgctcccccctaaatgtatatgttgaagccctaatacccaatatgactgtgtttggagacagggcctgtgaggagatgacaaagattaaacaaagtcataaaggttgggtcctaatctgatagaactggtgcccttataagaagaggaagagatactagaactctcctctctttgccatgtgaggtcacaagaaggcagtcatctgcaagccagaaagagaaccctcctaggaaccaaactggtggacacgttgatctttaacttctcggcctataaaacagtgagcaaataaacttccattgtttgagccaccctgtgtatgatattttgttctggctacttgagaagactaatataagctcaatgaattctcacatagagggcacaccaagtaattaccatctgggtcaagatatagaatattaccagcatcccagagtcctcattatttctcacccccaacccccctcctcccaaagttagccaactttggacaccaaaagcaagttttgactatttttgaatttttaataaataaaattgtacagaggaaaaataaaaatctttctaaataattcaataattcctagtctaagaaccaaaaaaaggaaactataaattattgtcttagaaataaaatcatgatatataaaaaaatctgtgatacaatctacaatctagtgacactaagaagaaaatttttagccttactttaatttattggaataaaaaattggaaagaaataatctacgaaaagaacaattaagtagaactgaagaaattagtaaaaataattaataaaggccaaaaactgtaatagagaaattagcatagatcagtaaaatcaaatctgtgtcctttttttttaaattgtgagactgtcttgctctgttacccaggctaggtagagtgcagtggtgcaatcttggctcactgcagtcttgacctcccgggctcaagcgatcctcccacctcagcctcctgagtagctgggattacaggtatgcaccatcatgcccagccaatttttttttattttttttttttttttttttttgtagaaatgtggtctccctatattgcccaggctggtctcgaactcctgggctcaagtgatcctcctgcttcagcctcccaaaatgctgggattacaggtttgagccactgcacctggccaaacctgtgttctttagaaggacaacctggactgagcatcttccatttgttcctccaaaaaacacagagtcagctggagaagggtgaagatgctggaagtcttcaggacactgaagttcccccagcatcttcgcccttctccagctgactctggtcctgggagactgatctctatgtactatatccagaggtgcccagttgtttggccagaggggagcaccagctggagttatgagggagaggagagtcaggttagaacatttatttctttagcttgatctctgcaggcatcttcctgtgtctgtcactgccagatctgagctcttctaaaggaggcctcttccatgactctctcctttcagcttctggtccctgctgcctccctccaccaactcatgtctaggagtgataatgcccctcattactagccccttgcatttccctataccctgcccacatctgtgtaaagagtcctttattaaactctcctcaaattattctatgtgggtatgcctaatgtttcctgactgcagcaactccccaaaattaaaaaataaaatagaaattaaattttaaaagcattttagaaggtttcaccaagagaaaacacacacacacacacacacgtgtgtgcacgtgcacacacaactacaacaacattaggaaaaggaaaggagaaacaattgcaaatatggaagaggtttttttaaggataaatcaattatatgaaattttatatcaataaatttgaaaatcagggaatggataattgtttagggcaagataaatgatcaaaattggtttaagaaaacaagcagaaaagaaaaggcagtcagggatttaaccccaggtgcccctaaatgaggcacctggggttaaatgattaaataagaccaaagaattttcatgttacataagttgttctacagcatagaaaaagattaacatttccccaactcctttgtgaacctgtcataaacctgataccaaaattagccaattagaagaaagtgattagtcaattccgctgaggaatatagatgaaaaaaatatcctaataaaactccagcaaattgagttcagcagtggattaaaagaaaaacatataatggatttattccaaaaagggaaagatgattcaacaataagatatctattactgtaattcagtgcattaagagattgaagggtggaaatcatacagtatctcgctaaatgctgaaaaaccatttgataaaattcaacacccattcctgtattaattttttaaagtatctcctagcaaaacagcaattaaaagaaactgcattatcttgatgatgggtatcttaccaaaatctgcagccaacaagcagggaaggaggaattagtcatagcacggacctcaaagaaacagggctttttttaaaagatagtttactaacagataatacgttgcatgcttcaaaatccaaaagacataaaagggtgtcaaagaaaagtcttttttagcccattgtccagtgattcagctgccctctcaagagacaagcaatattactagtttctcagttatccttctggagctagtttatgcatttgcaagcaaatttgtaaatctgtatattttttcacacaatggtagtaaacactggttcttctcattggcaaaatattattctatatcagtacataatgagatccctcattctttttttctggccaaaaaacatcactttggataaatgtaaatttgttcatctactactctgctgtgagataggtcgtttcaaaacttttgctatgataatgctgcagttaatatgctttatatatttatcgttttgagcacatgtgaatgtatatgcattattgtgtagtaaagaattcaatcttgcacagaaagaagttctgacctctgcctttggcttctaaaaggtaatttatgtcataccaggtaggaggatctttgtttaaggtggagactagccacaccagatcttaaagtagcattattcatacccaacagccttagtgtcaaggttggccatgtcagaaagactatgtgacttagggtggagactttgggtcatgcatatgattcaatctggggactgagttcaatcacgtgggcaatcaattaacaagtcacacctatatcatggagcctgagtaaaaactctgaacactgaggcttgggtaagcttccctggttagcaacacacatgtgtattgtcacacattgacactgggacagtgacacatgctgactccatgaggagaggacaataaaagcttgaatttggagccctcctggtttctgtcctatgcttctcttctttgtcttatcttaaattccatcttttccaagaaaaaactctatccttcccctgtaataagccatcaccatttagtataacaactttcagtgacttttgtgagccctttagtgaattatcaaacctgagggtaggaaccctccaaatttgtatcagaaatgaggaccatcttgtgtggagaacatgccctctaatcttgtagttggccctaagctcctcacaaggataaatccaggggagtagaattttttggtagaggtatatgcatttgaaagttttgtaaatatgaacaaaatgtccttcattgaaattatgccagattgtattcccactagcaatagagcagaggttttaacaaaagggtggggtgaaaccataataatcacttccccaccctggattgtgagaaggtaaagtcacttcttgggagggctgtagacattaggggaaagcagagtttaaaggcaaggaggcagggagaatattcccagatgtgattgaggcaggaaacatacacagggtttggggaagttgagaagaatggaagctgcattgaggacaaagaagaacagaatgtgcagctcaatggggaagtagagtggccatcttcaacatggagcactcatgctcctgggtgataccaagggctttgtgagggctttgtgagacaggatttccagatcctcaatgtccttatgtaccctttcctaaataaacctgtctgagaagatgcttgtgatcttctatttctccttctgcccctgtaccaagaaaagattcatgtttcatacacccgaaagtttccagagggaattgtcttgggacatcaacaactccgggacatccaaaaaattgacaagtagaaaatgcatcattcctgagggagactgtggctctaccttttctgtacagtgatgtcgttgtcaaggagcagatgtagcatactcattttatttttaaaatgcagccagacttcttctgagaataagtaagcctgatttggtggatagtttggaccaagaggactggcattgccaattaggttgtatggcaggtattttcataaattagataagcgaaacctgcagccataatgttttgacaaaacatatttaaggctcatatatagtatgtgtacactgaaattatatcttttgcaagtatttaatctcaagatgaaaaagtaaacaacttaaaaatgtgtgaaagatgcatagttttacaataatatgtaggtacaagaggttcaaaagaactgcagtagaagtctcgggaggttggaaccaactaaaggaaatagagattgtaatgatctcttgtagggtgggggtggatgctgaactggagggcttacttcgtctgaatgagagaaccaggaaccttggactctgcagatgttggggatggaagagggagggttaatggcagacataaagatcatcatgttattccaggctgggcgcggtggctcatgcctgtaatcccagcaccttgaagggccaaggcaggcggaccatctgaggtcaagagttcaagaccagcgtggccaacatgacaaaaccctgtctactaaaaatacaaaaattagtcaggcttggtggcgcgtgctgtaatcccagctactcgggaggctgaggcaggagaatcgcttgaatccgggaggctggggttgcagtgagccaagattgtgccactgcactccagcttgggtgacagaagagattccgtctccaaaataaataaataaaaattaaaaatcgtcatgttattcctttgaaatttcacttgtctctctcaagcatgtcagcatgtctttttttttctgtctttgcttttctttctctttttgtctctgcccaccacctttttccttctctgtttacttctgcctgagctcccattctctccccttcagatttcttcctctatcatttcctcacccctaccttgatccttgcaactgaattagcatgagtactgagctaatgaatatattctattaattgcatgttttagtatctcaggttcctaattcttctaaaaattgtgtgagatgtattttattttctgtttcaaaaagtgtaatttagttaccactgactttctaaagatgcctgattgctttattccctctggaccagaagctcttgtcaggatagaaaaaggctgccagtctttgtcctgagcatatcaaactatatacttttcacctgaggactctgctttttgttctctcagaaacctgtgagcacagcagttcctgtggagtcgctcctcagtgcatggcaagctgcagttctcctgtcccttcattccacacatgttcccttctttatcccacctgtctatagatgtcactggggacttgactttatttctggttattgcacatcctgatttctcccctcacaatttccattatccatccatcacgtcctgagggttttactgctgtggtcacctcccagcatgtccactcacataggccgtgccgttgacgaggagcgtcggcggggggaggttcctatgggggcaatttccttctctttggcagacaagagaaggaaattgccgaaaagaaggaaaatgcccccagagaaacccctgccccacccccgaccctcttggtttccttctctcttccagttgttcagttggaaaaagtcaaggagcccattggatcacatttccagagccttactgtgaagagtctttgttgttgttgttgttttaactataaaaagagttgttgaacatcattgtctacagttcttttacacctttaataatctattgcatggaccacaagcaggttgaaaggtgatttttatctcagttctataaatactggtgaaagtctgtgggccagttgcttaatttcactgggccccggtaggaaagatcacttctaggaaagcttccagctccagaatgtatgattccatcaagttctccagttagttggtatcacaaaaaataaagggcatcttccctgtctgccttactcctcctctttatacttcctgagcatagcccagcactgacacatggtagtcacctatggcagacttttacagactatatggaacctgctttgtcacgaacatggcaaatgacatgaccatcatggagttataaggactgggcttctcacacctccctctgcaatgaaactgggcattagagatgctgttattcttctcctcactccttaccttggtctcctctatccactaagtatcatgcttgagaatgaatcctgagagtcttgaggaaaagtgtttaccaagtactggataaaacacatggtgattaataacaagttaagctgcccaaaatttcatcttgtctttatcaatacctgtaattgacttttagctaaaccagcagccaacgtcatcattagctccagaagaagggtcttttatcaagtttaagggcacatgatttggcttgtagtcagcatacttccattctaaaaatggcagcaaatacgagaaaaattaaaatctaggacccacacttctaagaaagaaagaggagttataaggattgcaaatttcttgatttttaatttaatgatataattattttttccagaaaaacttttattcaacagtggtatggattaatggttccaaggaattatgacattctattaactttccacaagaattacttcattgcatttagattaaatttattttattagactgtgagaactatgtctcagcagatttcctttttgcttcaacccttttgaaattctttattttagtaaaaacaatataaacaaatcatctttgtttcttattattcacttgtgccaaagatgactttttattattatcatgttttatctttggaacaacacacaagaaaaaaaaactgttggttgcttttgcagagggaaactaggtggcaggaaacagggaataaggccaaatttttattgtaccacttaaattttgaaacatgtgaaaagactttcattggaaaaaattaataatgaaataatacaggcacataatttaaaaatcaatagtattaaaagacatttctctgccccacctatcattattccctctacttctttagaggcatctactttcaactctttcatctgcttctcatacttagcctcacatttctaaataggatgctcttattgcttcttctaaatttatcaactttagagagtgtctgttaatttccaattatgacattggaaagtttaatccttttatacatcatgacaacttgcttcccctttgtcatctttgcaatctggttgtatcatagttttttagtttaacaaacagccaacgtaagtatcatatactggtgaatcaagttggtctacaattttcttccttcctcttatggttttctactttccctctgtttatatttgcttaattttctgtgatattttttcaagtgattcgatagatctgttacatgtccaattttttcaaatgctcaaatgcatacatcacatttcccccagaatttttttaagaattctggctatcctgagattaccaactctggttatcaactacagcactcaaggttactcactcctttcttaagagcctcctttgttcacactaacttttcactgaaactctgttaccaatatcgttctacttggaaaaaggtaaattaaattctgtttccccaagggacatttcctcctctccaggagctgccaaaacaccgtgactattcttcctttgaactccctctctttctttaaaaagtcagtgagggctcaaggtataaataagcttcattcactaccagaacacatattatttattttattttattttaattatactttaagttctagggtacatgtgcacagaacacattttaatgtagcaagcttgcatatcagtagacacgtgtttgtttatatgccagcatcacagtggatgccaagtatcagacatgttccctaatgtcaaagactttacaatctggctcacgtaacacaggagtgaaacagaactaacaatcaacagttcctttctatctctgattaatagttcttccataccttaaatgtattaatctttgtaaaattatctattttttgttcttttcttctgtctttttactctcttatcctgtatgctagctatgacactaatgtctcactgcctaatcattgtatttttataatttttggaaactgtcacattttgcctccaaagctgacctttcacaagttacttaatctttttgcatctcatttcttcatatgtaaaatggggataataatgttaccttttaaatttgttttgagcattaaatgagatcaatgtgatgaatttagcccagttcctgacacttgataaaatagtcaatagatagtaactattgtctgcatattggaattatttgttattatcatcattttacttggacataggagggaatcttaaagcaacatttcactatcttctaatagccagtgttattattaagaagtctgatgctaatttcatttccattacttgtaagttaccttttctctttctctttctcttcctcactgccctctccctgtctctaattttctctctctctcttctctccatcatcactgttttaaaaattcacaatggcatgtttttatttagcacttttaatctggacatttcttttctccacttctggaaattttcattctacttctttgataatttcttccctccattttctctgctctatttctggaatttcttaaaactgccagttttcttttatttccattattcatggtctgatttatttttggtattgagttcatgctaatatctgcagctgtcagtgtaattaccattgtcatcttagtgtgatggttctagagcttgaaatttctatatttaaaaacaacattatacttcacaattaaaactaaaaacttaagttagaagtgtaggctagcggcctacatatcacatcttttgactttgctctggagtaatttttaaattacactattcaaaggaatacattttgctctgttctcttctccgtaaagagtaatagcagaggaatttaaaaatgaaagaacacaagaaaggccttgaggatgaaatgtgtttcatccatctctgaattttatcttcttttcatcagctgggctataggatggacctaaaaaattggagttctctcttatcaacatgaaacatagctagcagtcctgactgtatctaaacccatctgagctattttaagacctttgtagatcttcaacattctggtttttgaaagccccactcagagtcttattaaaactttttttttttttttttgagacagagtctcgctctgtcacccaggctggagtgcagtcgcacaatctcggctcactgcaagctctgcctcctgggttcacgccattctcctgcctcagcctccccagtagctgggactacaggagcccgccaccatgcctggctaatttttttgtatttttagtagagacagggtttcactgcgttagccaggatggtctcgatctcctgaccttgtgatccacccgcctcggcctcccaaagtgctgagattattaaaacttttaaaatgcactcatatcacaaataatattgtcccaggcactgttctaagaacttggcatacattagtgaacaatactaagacccttacccttgtaaagcctttattctatataattgatatccagctaaggaagagtcaggttgaattgagttgagtataattaaatggttggcatgttgtgttaggtagacacttatgttaatacgtcaggttagtctagactgtactgagggaacaaacagtcccccaaatcccagtagcttaacataacacaagtttatttctggctcacgacatgttcattatagtttagaagggctctgctccatagacgtagtcactgggaacccagacttcagaaggcatcactgtcttgtagctgcaccaatgagtacatacgacctcttcagtctccacaactgggaaggagtaagatggagagtcatgcattgacttttaaatgtttcatgctaaaagtgacaaaggccacttccagtcacacccaatggccagaaccagccacaggccctgcctaacggcaaagagacgggaaaatgtgggaaagcccaggaatattcataggtagtaaatatctccacaataaagcttattttaatacttgtttatttcattctgaagttttcctttgacactttaaagtcaataaatgttttcaagtctcagatgtttgcaggaagaactcataggccctaagcattgttcctacaattataatagtttgcattatatttactgaaaggttattacatgcaggcattgttttaggtgctttatatgagtatgtaaatgtgttgctcatttactcctcacaacaatgctatgacgtaggtactgttcctaccctcattccacagctgaggaaatagaggcacagaaagggtaagtcacctgcccaagtcacacaactagtgaatgactatgcctgaacttgtgccacctcatcacactgcctttcagatgtgaaggataaacagcctgtggaacatgcagcatttatattttctgcctgtaccaacacttatggtcacaataatgaaagaggaaagaaaagaaagaggaaaagcaaaacttctgtccagtttgagaccagtagtgagcagttctcattttcctttgggtgtgtttctaggcagaagagtacataaagagacaggagaaataggagataaccttcttccttgaaaagcttgagattacaatacccactacagcctgcatgctggaaaaaatgggataaagcagctacctaaccagtgctatcctaatggaatttattttgccttcaaatgagcatctaatgtgattaaagaatggaagttattaaacaaacaaggtttaccaaggcatttctttccaatttttgtgtgtgaaacaaatgtaaatgtagccaactggctcaagatgttgccttacccgaaaccttgcaattagagattgtagaacattcatgactcagcacatctattcacagtgcaggctgtttatttctggttttgtattcaatgtgtcaccaaaaagtgcaagcaagactcagcagcatgcaagcctgcactaacatgcacatgctcagtaaacttagactaagaatctacactagaccaagagcacatactgtgcaatcccattcatacagtgttcaataacgggcaccaaccaagaatttcatatcctgccaaactgaactttataagcagatgagaaataaaaaattttccagacaaataaatgctaaggtaaggtaaggcaagtgattgttaccactataccagcccaagagatccttaagggagttctaaacgtggaaacgaaagaataacacctgctaccatgagaacacacataagtatatagcctgcagaccctagaaagcaaccacacaataaaaactacaaagtaaccagctaacaacttcacaataggatcaaacccatatattgatattaaccttgaaatatgtaactggcataattgctcctacttgaaaggcacacaatggcaagttggataaaaacaaacaagacctatccatctgctatcttcaagagactcatctcacacataatgacacccataggctcaaagtaaaaggttggagaaaaatctaccatgtaaacagaaaacaaaaaagagtgggggttgctattcttatgtcagataaagcagactttaaaccaacaacagtaaaaaaaaaaaaaaaaaggacaaaagggcattacataacggtaaaaggttcaattcaacaagaagacttaactaaatatatatgcacccacattagagtagctagattcatgaaacaagtgtttctagatctatgaaaagacttaggcacataataatagtgacttcataataatagtgacttcagcacttcactgacagcattagacagatcatcaagggagaaaactaacaaagaaattctggacttaatttcaacacttgacttattggacctaatggatatctacagaataccccacccatcaaccacagaatatacattcttttcatctgcacatggagcataccgtaagattgaccacacacttggacataaagcaagttttaataaattcaaaaaaatcaaaatcataccaaccatactggaccacagtgaaataaaaacagaaatcaataccaagaagatttctcaaaaccacataattacatggaaattaaacaatctgctcccaaatgacttttgggtaaacaaaatcaaggcagaaattttaaaaaatccttgaaataaatgaaaacagagacacaacatatcaaaatctctgggacgcaggaaaagcagtgttaagaggaaagcctgtagcactaaatgcctacctcaaaaagttagaaagatcccaaattaacaatctaatatcacacctagaggaactagaaaaataagaacaaattaacccgaaagctaggagaagaaaagaaataacaaaaatcagagctgaactgaacaaagttgagacccaaaaaattatactaagaatcaacaaaaccaagagttgtttttttgtaaggataaacaagattgatagacactagctacataaaaaaggaaaggctcaaataagcacaatcagaaacagcaaaggtaacattacaattgattccccagaaacatacaagatcctcacaaactattatgaacatctctacacaaagaaactaggaagtctagaggacatggatgaattcctggaaacatacaatctcccaagattgaatcaggaagaaactgaaacactgaaaagaccaatattgagttctgaaaccaaatcagtaatttaaaacaaacctatcaaacaaaatacccccagaccgaatggattcacagccaaattctaacagacatacaaagaagagctggtaccaatacaactgaaattatttcaaaaaattgagaaggaggaactcctccctaacccatactatgaagccagcatcatcctgacatcaaaactgggcaaagacacaaaaacaaaaacaaaaaaactacagatcaatatccctgatgaacatagacacaaaaatccacaacaaaacactagcaaaccaaattcaacagcatatcaaaaagttagttaattcactatgaacaagtaagcttcactcctaggatacaagtttggctccacacatgcaaatcaacagatgtgacataaacagaattaaaaacaaaaggcatatatgttagttccgtttcacactgctgtacagaactacctgagactgggtaatttataaagaaaaaaggtttaattgactcagttctgcatggctagggagacctcaggaaacttacaatcatggcagaaggctaaggggaagcaaggcacatctttccaaggtgaagcggcagacacagagtaagcaagagaagaagtgccacactttaacaccatcatatcttgtgagaactcactcactatcatgagaacagcatgagggaaaccggcccccataatccaatcacctcccaccaggcccctcctcgtgcatgtagggattaaaattcgagatgatttgagtggggacacagagccaaaccatatcaccatatgatcatctcaatagacacagaaaaagcttttgataaaatcaagtatcccttcatgataaaaactaggcattgaatgaacatacctcaaaataataagagccatctacggcaaacacacagccaacatcatactgaacaggcaaaaactgggagcatttctcttgagaactggagcaagacaaggatgcccacattcattaatcctattcaacataattctggaagtctagcctgggcaatcaggcaagagaaagaaataaaaggcatccaaataggaaaagaggaagtcaaattatttctcttcactgatgacatgattccatacttaagaaactctaactactccaccagaaagctattagaactgataattttagcaaacttccagactacaaagccaatgtacaaaaatcagtagcatttctatacaccaataatattcaagctgagagccagatcaagaatgcaatcccatttacaatagcctgaaaaacataaaatacctaggaatacacctaaccaaggaggtgaaagatctctacaaggagaactacaaaacactgctgaaagaaatcacggacgacaccaacaaatggaaaaacattccatgcttatgcattggaagaatcaatatcattaaaatggccgtaccgctcaaagcaatctacaaatctaatgctattcctatcaagctaccaacatcatttttggtaaaaatgaaaattttcaccaaagagaattttggagagttggaaaaaaaaactgtgctaaaattcatacggaaccaaaaaagagctcaaatagccaaagcaattccaagcaaaaagaacaaagctgggggcatcacattaccctacttcaagctatactataaaactacagtaaccaaaacagcatggcactggtacaaaaacagacacatagaccaatggaacagaatagagaattcagaaataaagccacacacctacagccatctgatctttgacaaagttgacaaaaataagcaatggagaaagggctccctattcaacaaatggtgctaggatagctctctagccatatgcaaaagaataaactggacccctacctctcactatataaaaaattaactcaaaatagattaaagatttaaatgtaagacctcaaactgcaagaatcctaaaaggaaacctaggaaacaccattctggaaatgggccttgggaaataatttatgactaagtcctcaaaagcaattgcaacaaaaacaaaaattgacaagtgggatctaattaactaaagagtttctgcacagcaaaagaaactatcaacagagtaaatggacaacttatagaatgggagaaaatattcacaaactatgcatcaaacaaaggtctaatatccagaatctgtaaggaacttaaacaattgaacaaacagaaagcaagtaaccccatcttaaactggacaaaagacatgagcagatacttctcaaaaaaagacacacaaatggccaaaaaacatatgagaaaacgctgatcatcactaatcattagataaatgcaaatgtaaactacaacgagatgccatctcacaccagtcaggatagctattattcaaaagtcaaataacaacagatgctggaaagactgtggagaaaaaggaatgcatttacactgtcggtggaaagttgtttgcagatttctcgaagaactaaaaatagaactgccatttgacccagcaatcccattactggggatatatccaaaaacaaaaaatcattttaccaaaaagacacacctatgtgacagaggcaatatttttggagataaaatctgagaagttttcaaaattaaggtataaattttcagataaaaagatcattcagcatccaaagtgggaataaaacaaattattaatccattatagtgaaatgagagatcaaaaacaataagaaaaccttaaagacatccaaaaagaaaacagattatctcaaatggaactgaaattcggctgacagcacttattatcagcaacaaataaatgccaaaagacaatttaatatcttcaaagtgctgaagggaaataactgccagtgttgaaacctataccaactagattcttagtcaagagtgagaataaaataaaatgtaccagttggggtcgaaccagataaggagaaccagtaggagatgagagagagagagagagagagagagagagagagagaaatttgtcagaaataattggtttacacaaccgtgaaggctgggaagatcacaaacaggctggaacttcatggacaggtgctgaagcttattgtccacagatggcaatcaggaaatcaagattcagggagaagggagagagccattgcagactcataactgttcagagtctcccacacagggaatggctaggccttccaaatgatgtcttcacagcagtacctaaattagtttacttgaatagctgagaagtgtatatactggaaaatggctagtatctctcttccatcctccagctcttggaggagaatattccttgtagcccaccataactggaaacattctgtaaaggagattctggggattgtagttcagtctagccaagttgcctcccattggcaatccaaccacgaggcagttggcaagagagcttaggtgatgcaacttgtgggccagagcagggagagaagggtggagaatgtgcacaaaggacatagcagtatttatgtctgacagaaaggactttaagatcaaagcattattaggagtgaaaaggagcattgctaatgataaaaggagtagttcaccaagaagatataacaatactggacctatacaaatctaacaaaataagctttgatatttaaaggaaacatcacaggagttataaggaaacacccacaaatatactaccatagtagaaggttataacaaaaatctcccagaaagtgatggattcaaatgacaagaattttctgtctatagaaagtacaaacaacccagtaagtttcatatagtgaacatatttagaattctactcccaataattaagaacatacagtgtaactgaaaaccatctaaatgtccttcagctggtgaatggataaacaaaaaaagtaaatgaattgttgatacatgcaacatgaatgaatctcaaatgcattatgccgagtgaaagaagccagactcaaagggtcacatattatatgattccatttatataatatctgaaggaggcaaaaattaaaggaacagaaaacagatcattggtttccaggaaggtagggaagtggttgactacaaaacagcagtccaagggaatctgttttgggggggcattgaaaatgttctgccagcccaggcaacatggcaaaaccctgtttctactaaaaatataaaacaaaacaaaaaattagccagatgtggtagcatgcacctgtagtagtcccagccactctggaggctgaggtgggagaatcacctgagtcctggaagtcaaggctgcagtgagccaagattgtaccactacactccagcctgcgtcacaggtgtgagaccccaagaaagaaaggaagggaaggggaaggggaagagaaagaaagaaaaggttctgtatcttgattgtggtggtggggtggtggttacatgactctctgcatctgcaaaaactcacaggactgtacaccaaaaaacagggaagttttctgcatacaaacacgtttttaaattaaatgttaaaaagtcttttcaagctcaataaaataactacaaaattgaccgagaacaggatcacaaagaatgtcttaagaactatcaaatgtcaacacctcaaaccccaaattttctaactatggcacaataaaactcccaatcagttataaaaatttagttcctgaatcttctacttttggaaaccaaaaaaatactttgaaataattcaagaaggccaggcactgtggctcacacctgtaatctcagcactttgagaggccaaggtaggcagatcacctgaggtcaggagcttgagatcagcctggccaacatggtgaaatcccatctctactaaaaatacaaaaaactagctgggtgtggtggtgggcacctgtaatcccagctattcaacaggctgaggcaggagaatcgcttgaacctgggaggcagaggttgcagtgagcagcgattgcagcattgcacttcagcctgggcaacagagcgaaatgctgtctaagaaaaaattaaaaataaaaaaataattcaagaagaaatcacaatagaaatcatcaaatatttagaacggaataataacaaaagtattaaatataaaaatttgttgagcatagctaaagcagcacttggaataaacagcatagtcttagatgcgtatatgaaatacagaaatttaaaaaataataagccaagtgttttgctcaagaagctagaaaaaggacaacaaaaatattttttaaaatagaaagaagaaaataatacaaataagaataacattagccataattgcaaacgaaggcacaacatagagaggactgttaataaaatgacagtagaattgtggctgagagccagacaaaaaaactatgaaaataatacagaatccaaacaggtggaaaagagataaattgaagccagtcaagtggagaaggaaattaggtgtattccagctaggagtatagaatttcatttccccaaatcaggagataaaaactggaaagtgattactattaatattggtgcccagggaacatgtgaggcacttgtttataaactcattcccactgaagggctttggctggacctgcccatgcctgcttggtcccaggaaaagacagagtccaattcttaaaaagggtttagtgtgcgcccatctgtgcttgggtagaaattgacttaatacagaagttctcaggaaccccaaaagcatttatttccatgaagtttagttctcaatatttaatgcattagagttaaaaactttattcatttaaaaataaaaataataaaaccaatacaacatcatttgcaaacaatgcaaaaatgagaacaatcaaaatatccacaaatagggaaaaccattagtgaactgtagtatatttatataatagaatactatacagcctattttaaactaaatctataaatattatcatggataaatctcaggaaaaaacattttgagtgaaaaagacacgtggccaaaaaagtggaatatacaatatcatgtatgtaaattttttaaggcaggaaaaaattaattggtagaagcagatctctgaatgccaggctgcctttgaatttattccagtaggcagtaagagatcactgttgaatgaacgagtcataaaaagagtttgagcagggaaccacataacttgaccttttctataaggagatcagtcctgcagggttcttagtctaggggccatatagagaattcagggggttgtgtccttacatgtggaaaaaatacatctttgtttatagaaaatgtaatgtttccttcaattatgaacacaggtaatgaagcacaatattagcaagacctatgccattgtctccaatagaaatcacacatgttttcatgtcacattatagttgtgatggatgtctttaaatattctttatgttcatcacactttaaaatgagagtggaagttagacctgcttctggatctcattatgtaatgatttaataaagaagcatatatatatatatatatatatatatatatatatatatatatatacacacacacatatatatatgtatatatatatgttaaaccacaaatttgatttttgatatggtttggctgtgtctccacccaaatctcatcttgaattatagctcccataatccccatgtgtcatgggagggacccagtgggaagtaactgaatcatgggggcggatttttcccatgctgttctcatgatagtgaacaaatctcatgagatctaatggttttataaaggagcattcccctgcacatgctctcttgcctgctgccatgtcagatatgattttgctcctcattcaccttcagtcatgattgtgaggcctcccccaccatgtggaactatgagtccattaaacttctgtttttaaataaattacccagtcttgggtatgtctttattaacagagtgagaacagactaatacaatttttaaaacattttgaaatgaatttaatataaagaattcctgtgtaattctgtttcattttatatatttaataacatgttttgagaacatctatcagcttaaccagactgccaaaggggttcattgtaaaaaatggtaaaaactaagtaaaatggcaaagaatgggaagaagcctgaacagaccaataacaagtaacaagattgaataataaaaagtttttcatcaaagaaaagtccaggacctgatggttttactgctgaattctaccaaacatttaaagaactaataccaattattcccaaactattccaaaaaattaaagagcgaattcttccaaactcattctatgaggccagcattaccctggtatgaaaaccagagcgaaacaacaacaaaaaagaaaactacaggccaatacctctgatcaacatagatgttaaaattttcaacaaaacgctggcaaaccaattcaacatcacatttaaaagatcattcacctgtatacatacgtaactaaacctgcacgttgtgcacatgtaccctaaaacttaaagtataataaaaaaaaaaaaagatcattccccatgatcgaggaagactcatcccagggatgcaaagatggttcaacatatgtaaatcaataagcatgacacaccacactaacagaatcaaagacataaaccatacgatcatttcaataaacacacaaaaaagcatttgataaaatttgatatcatttcatgataaaaactctctacaatctaggtatagaaggaatgtgcctcaacacagcaaaggccatatatgacaaactcacagctaacatcatacttaacagggaaaagttgaaagcttttcttatgagatctaaaaaaagacaagaatgctcactttcaacaatttcattcaacatagcactgaaagttctacagatcagttaggcaagagaaaaaaataaagggcaaccaaattggaaaggaggaagacaaattattcctgtttgtggacaacataattttatacatagaaaaccctaaaaacttcacaaaaaactgttgaaactaataaacaaattcagtaaagttgcatgatataaaataaacatacaaaaattagtagcatttcaatacaccaatagtgaactttcagaaaaagaaatcgagaagcaatcccacttacaaaagctaccaaagagaagaagagaaaggcaggcgggagggaaggaaggaaggaagggaggaaggaaggaaggaaggaaggaaggaaggaaggaaggaaggaaggaaggaaagggaagggaagggaagggaggggaggggagggagggaggaaggaaggaaggaaggaaggaaggaagaaaggggctcaggcctgtaatcccaacactttgggaggccaaggtggcagatcatctgaggtcaggagttcaagaccagcctggtcaacatggcgaaaacccatctctactaaaaatacaaaaattagccgagtgtcatggtgggtgcctgtaatcccaactactcgggaggctgagaaggagaatcacttgaaatcaaaaggtggaggttgcagtgacctgagattgtgccactgtactccagcctgggtgatagagtgagactctgtcagagaagaaagcaagagaaggaagtaaggaaggaagggagggagggagagagagagagagagagggagagagagagagagagagggagggagggagggagagagagagagagagagagagagagggagggagggagggagggagagagagagagagaaagaaagaaagaaagaagaaagagaggaaggaaggaaggaaggaaggaaggaaagaaagaaagaaagaaagaaagaaagaaagaaagaaagaaagaaagagaaagcaagcctaggaataatcttaattaaggaagtgaaagttttatacaatgaaaactgaaaaacattagtaaaagaaactgaagaagacacaaataaatggaaagatatcacatgttcatggatttgaaaagctaacattgttaaaatgtccatactatacaaagcaatctatagattcaatgcaatccctatcaaaatatcaatgatactcttcacagaaatagaaaaaaacaataataaaaatatttgtatggcaccacaaaagactttgaacacccaaagcaattttaagcaaaaagaacaaagctggtggcatcacatgacctgatttcaaaatatactgcaaagctataataatcaaaacagcctggtactggcattaaaaatagacacataggccaatgaaacaaaatagggaacacagaaataaattcacgcacttacatacacatttatagccaactgatttttgacaaagagccaactgatttttgacaaagatgccaagaagacacacagagatatcagaggggaaaaaaaaacagcatttttaaataaatggtcctgggaaactggatatccacatgcagaagaatgaaactaaacccttctctcaccatatacaaatatcaaatcaagtggattaaagacttaaatgtaagatctgaaacaataaaactactaaagaaaacataggggaaatgtttcatgacatcagtctgagcaagaatttttttggatcagacctcaaaagcacaggcaacaaaagcaaaaatagacaaatgggatcacatcaaattaaaaaacttgtgcacagcaaaggaaatagtcaacaaagtgaaagaataatccacagaatgggagaaaatatttgcaaactattcatttgacaaggagatactatttagaacatgtaaggaactcaaatgactcagaaaaaaaaaacacaaataatacaatttatttatttatttatatttatttttgagatagagtctcactctgtcgcccaggctggagtgcagtggcgcaatctctgctcactgcaagctccgcctcctgggttcacaccattctcctgcctcagccgcccgagtagctgggactacaggcacccgccaccatgcccagctaatttttgtatttttagtagagatggggtttcaccgtgttagccaggatggtctcgatctcctgaccttgtgttctgccctcctcggcctcccaaagtgctgggattacaggcgtgagccaccatgcctggccaatacaatttttaagtgggcaaaaaacctgagtaggtatttctccaaagaagacatacaaatagccaacacatttatgaagaaatgctcaacatcattaatcatcagggaaatgcaaatcaaaacgacaatgagatatcacttcacccgaattagaatggctattataaaaaagacaaaaaaataacaaatgctggcatggatgtaaagaaggaggaactctttatatactgttgatgggaacataaattagtacagccattatggaaagcagtttggaggctcccaaaaaagttaaaaatgaaactagtatatgattcagcattccattgctagatatatatctaaaggaaatgaaattagtatgtcaaaaaatatccatactctcatgtttattgtagcactattcacaatagccaagatatggaatcaacctaagtgtctgtcacgtaagtgtctatcactatcaatggatgagtggataaagaaaatgtggtatatatacactagagaatactacttagccttaaaaagaaattaaatcccgtcatttgtgacaacatggttcaacctggagactattttgtaaaacgaaataagccaggcacagaaagacaaatactgcataatttcactcatatgtgcaacctaaaaaaattgatctcatagaagtaggtagaatagtggttaccagaggctggggaaaatacagaggagtagggcataggaaaagtttggtgaacaggtacaaagttacagttagatagaaggaataagttatgatgttctattgcacagtagggtgactatggttaacaatattattatggtatatttcaaaatagctagaaaagaggacttttagtgttcttactacaagtaaatgataaatgtttgaggtgatgggtttgctaaatatgctggtttaattattacacaatgtatacatgtatcaaaacaacacactgtatcccataaatatgtacaattattatgtgttaattaaaaacaaacaggaaaacagaatgggggggaaggttggggcagattcctggaaggctgttgcaggagtctgcagtctgattctgtgataaaagggcccagacaagggtatagtaagaggaaaggactgaagttctgatacacgagtgtctgactcatttcctgcccaggcccagtatctagcacagtgcctggcacatagaggccaccaagtcaaatctgttaaatgaatagaaaatggaactggcatgagaggcaagtgtgaagtggaatatactgggttagtccagcgagtaggattatgaggctaggaagaaggacggaccaaaggcatagaggctgttgcatcaaacttagatacgttccagtgaagtctgaagctagagcaggtgcaagtggatggcagacttgcaatgtgcctaccaaaagtaaagggctcatttgtcttctgagcctttggatagcccataatcacacattgctgttagtttttaatttcactggatcttgttccagatttgctttttctcctttatacacgggcctcttgagcatatttgtcagtcctcctggatgttgtccacaaagtcaagtttggatgaggcttttcctagctcagaacttctattgcaaggaagagtttgccctactatataataccacccagacaagacctgaatctagggccagaatcacaaatttttttcaaaagcaattggattttatgatggttaattttacatatcaagttgactagactgaggcagggggtaagatatttggttaaacattattctgagtgtgtctgtgatgttgtttctgtaagattaacatttgaatcagtagcttgagtaaaggagtttgccctccccagtgtgggtacacatcatccaatcctatgacggtttgaatagaacaaaaagtcagaataagccaggtacagtggctcatgtctgtaatcccagtgctttgggaggctgaggcaggagggttgcttgaggccaggggttcaaggccagcctgggcaacatagcaagatagcatccctaccaaaaaaaaatttttttaaattaactgggcatggtggtacacacttgtggtcccagctactcaggaggctgagggaggaggccaggagtttgagctcacgagttcaaggttgcagtgagctatggttgtgccactgcactccagcctgggcaagagagtgagatcctgtctctaaaaaataaataaatactttttaaaaggtggaataagggagaattcactgtctgcctgctgtcttctagctgagacgctggtcatctcctgccttttggcttgggctaagactgaaacttacgccatcagctctcctggttttcagggcttcaacctcaaattacaactatatcctgggctctcctgggtttccagtttgcttactgcagatccttgggcttttcggtctctgtaaccacacaagccaatttgttataataaatctatttacatatatacagatatacgattcactttctctggagaactcagacttatacaatttttttggaaattttagttggacacaatcttctttgtctacaactctccatccacaaaaacattacaagaccataaatttagagcaaaatcatttgttccttgtgcttgttaaatttgctgagccaacaaggtgcatcaagaaaaatgaagaataaatttcagaagaacttaagtttggctaaaatggggagggtgaggtctgctttgaagggggcagaaaagagggttctgtgggacacatgcacacatgggcacacaaacaggcacacacacacacacacctgctccatttcctcctcatctgctcttcatgacttctggcagtctaacttccatcccaaggctccactcttagccctttactcctgttcatctctactttctccccaaactccaactattccctttgtgttaatgatatatatacctctagccttgtgctttcaaaaataatggaatcacagcctgtctgattcatctaatgccttcatttcacagatgaaaaaattgaggatcctagaggtctacagatatgcctaagatcgcacatctgctggtaattagaagagttgagactcaagccaggtttcctaactaccagtataacattctctgataacgtggttgtccctctagtctatagttagctatgaattatctccaatactacaagcctcaacatacaatcagagagatagcagtcacttgtaaaatgttgagtcttaaatagataactggagaaaagtatttatcatataaggtagtaaaatggttaatattcttaatctataaaagagcatcctattcactcaacacatatttactgagtgctcactagacagttaacagtgctaagcactgagaatgcaaaaagtgatgtaagaaaagcatgatttctgcttgcacgtggtttactgtctagtggacagagaaagactaacgagagaattcctgttatgaaaggcagttgtgcacagcttctcaccccctgcatcgttacataagagcagccttgggcctggaacattttcttgcacagagataaagagtcatcatagcctgtgctaggcacatctctgctttgtaataactttccccgttccgggtttcacgtgtacttctttgttcttaagcgcatgggtcaatggccatcaagtgcacctccagctttctatagttctggccccagggggatgggttgaggatcttcacctgcagcaacagagcagtgtatgcattccatctccctgcatcagctagaggtcaagacccactgccatgggggcacacagtcatcactgaagctaatcctgttccatctcttctctatatgagtaaagtgttttccatccagtgcctgtgtgaatcatctttcttggtgacatggacatctccaaaccatacagtaagttaacatcctgggactgctgctttggtgataagcaacaggggtcatttgctcaacaacgactgtaatgaaactctagctgaaagaaaggaatgcctgctttaaaagcacataatttagggacttgacccagtttggatgtatgatccagattaggggatgccggggaagtatcagtgaaatgactgaagtgagaaaaaaagtataaacaagtgctaattagtaaaataatgtacaaaggtcctatggcaggagtaaacatgatatatttgaaaaactgaaagaaggctggtttgtcttcagagcatgaagtaagaagtagtatgggttaatagagactggaaagagagatagagaatataccttgcagggccttccaggtcacattgagaatctgattgtgaatccactaagaaatggacagcatagaagagtgttttacagagagttttgacacagagagatctgggttttgaagagatggggcctgttggcttgggaaaatggatcagagaggaagaaaatggacacagagagatgtgtgagaccgttgccaagatccagaaaagtgtgcatggtagcttagaccagtggttctcaccagggaaattttactcctctgaggacacttggcaatgtcttgagacattcttggttgtcacaccatgtgtgggaggatgttactggcaactagtagggaaaggtcaaggatgctactaaacatcctacaatatacagggcagttccctcaacaatcatctgacctgaaatatcaatagtgctccaactgagaaatcctggctcagaccaagatggtggctgagagagaaggaagtacatattgcagagacgattaagaggctaaaatcagcagtaattagtgactgattgatcgtgtataatgggggaaagactatcaaaggcaaccctcaggtttctggcttgctcacctggatgagtggggagtgccgagatgagaaatgcttgaggagttgatggtttggtaggggaagataaggagctctgcttgaaaccctgtaaatgtgaggtgcctatatgacacttgaaagatgaaaaacacaattctctaggtctacagatcaagaggggaagcctgaaccctgtatttgagagcttctgtgaataaaacagaagacgtaggcatggatgagattacctaggaaaagaatacagaatgagaagaaaataatcctggagactgagtcttgagaaactcccaggaaaggagcaggaaccagcaaaattgtctagagaagtgggaggacatggcacgcatcagatgcttcaagagggcctgtttcctggcaccttctccaacacaagcaccactgattattattgctatttttttttgagacagggtcttgctctatagtccaggctagagtgcagtggcatgatctcagcatctcagctcactgcagcctccacctcccagattcaagtaattctcgtgcctcagcctcctgagtagctgggacaggcatgcaccaccacacctggctaatttttgtattttttggtagagacggggtttcaccattttggccaggctggccttgaactcatgacctcaggtgatcagctgacctcggcctcccagagtgctaggattacatgcgtgagcccctgtgcctggcctagatctttttaaactttgctaagctaatcaagtctaatcagtttttttttaatcttgtttaaatataccaaagttttagttgacaatttttggtaaataatgagattaagcatctctgccatgttagtcagccattcatatttcttttgtaaattggccaatgcatgtgacttgcccattttctatttcagatattcatatttttctatagactttagtatatcttacggttttaaactctttactgtcacattcttaggtatttcctgagaatttatcttttttttggtgggggggggttgcagtgggtggtgtctttctattcagtcatttttcattttcatggattcaaatttgttgactttatttctcttcctgctttgactgcatagtagaagagactgttctttcccaaggatgataaaaatgttcttctacattttttagtatgtcaaattattttatacatttaaatttttaaaccacctaaaatctatttttgtgggtgatgagtaattagaatccttttccaaatgagccagttgtttcaataccagttattgaataatatgttatttcaacctgttctttatcttataatcctatatccaatagtctgttgtggcctatcttttttgttctttagatctctcagtatattcctgtgcccaagccaggctgtttttattactgtggctttacaatatgttttgatagctggtgggcaaatctgtattattttataatcaggaaaactcacaaaggagtgtgtgtgtgtgtctgtgtgtgtgtgtgttcttgcatgtggaaggtggatgaggaaatgcctttgaatgactaggtctactttggaagctgcaaaggagtttgacacagtgcctggagcagagtttccagaaaagcttggaaaaataaaaggagaattggagactacagggctctcaaaggaggctgatgctcacacttacaaggtctgtaggttgatgcaagcagagaggaaagctggcatggactgatctctgttatttttatacactagcactaactgcctttcaaggcccattaggcctggaaaccttttcccagcccctgggaagtcactggggatgctaaggttagtcattcacccactggggctatctaactgagctcaggtccgggtgcactgccagcagctgtttgtgtacttacagccccctgggtgcagacggacccccagctgccagccatatgccttatgtttcattgtcccacagctttcaaagaaaacaagtcttttaattcagcaagtattcactgaatgtctgacacccccagtgcagaccctgtcccaatcccccaatggggtccacctctatccaactctgggtgaatgaccatggtgctcttgcgcgcgggcacacacacacacacacacacacacacacacacacacacacaggcacacacacataactcaggcttggggcccacctctctgggctcagaggtatcaaagcaggggcattcctatcttaaggacttcttgtcttaggggctttggccccacctgcacaggacagaaaattagtggatttctaggagaaagcaggctatggcagggtatagccagggactcagctcttccttccagacatgcaggaaccataaggagggatggtcaaacagggcctgcttaggcctcttgctgggatcactccaagggtctctggggtcactcagaggagccgggaggctgcctgctgctgtacactgagacagactcctggggtgtttggatcacggcagcccacatgctgcctttttgttatcttttctgttttgcctcttccgggctgtacttgtcttgagtttttggccttatgacatccatattaaatggggtagggcagagcattgctcagtaaacagcaagaatggccctgggcatggccaaggcagttctgctaagtgtgaaagggaatgtgcctgccatactttgtgctttaggcccaagtgacctaggggccagcctgcctactggcctcactcccaacattacaggtgtttgactctactccaccccgtggagagacggagcacaggagccacccaccgggggaccacataaggtcatgcacacccacagagtgcccagtccctgcctggccttgtccccattttccctccacctagggttggggtgacaatggaggtaactagaagacagatcaaaaggttcttggtcttgacacagatgcaagaaggaggcagataatagacacctcccttccccctcgcccacataggctccggtgggttctcagggcaaggcctggctccctcctctccgacttcaggtacaggtgagtgtggagggaactgaaagaggaaaggtgaagtgctgtttggcttcgacctggagggggacagaaggctctctgggcaggcagggccggtcttttggcaagaggcgcgctctctctcccttccccttccatcgagggctgggtgtgaaggtgagagcaatcagaaaagaaggtgaagaggtacttggccttgacacggacggggggggcggtcccaggccgaggccgccccgcccccgccccgctatacccggcgccgcctcccggcgtctgagctgacacctccttagcgctggccgcgggccgcctctgcggcagcgctagtcgccttctccgaatcggctccgcacaggtaagatcaggggacccggcgcctgagctgccgaggaaggagtcgggggtgctgcgtgagactgagagttgggaggcaaagaaacaaaatcggatttcctcagagggccagaggaagagactgaaacacggtagccccaaatccttgggcggctgggaggtggtccctgtcatgcccacgacgggtgggcgcgtctttaccgacagcctgcatggatccgcagatgtgctgggcgcttagatgcctgcggctatgcagagacgcagtccagagaggtgaccccagatcctggtgggggctggatcccagggccccgacatccctttgcaatttccagccagcagctaaagactcccttcccggggctttagagaggctccaggctcgcgatccatgaacacacaaaaaccttccttgctcatgttctgaaaaaaagccccgcctcagctttgtgaatgttaataatagggggaagatttgttctctcttgggtgtgtgtacaggtggaacaatctgcagaaaaagaccttttttcggaaaaccttttcagtttgaagtttcagcaaatccatttttcatttcctttcatttggggagatgacatgaaatttaagctccagctttggggctgtctctgaagttctggggttcggcttacctttcccgggatgaggttttgatttggaggaagtaaaatgggttttgtcttaacctgggctcgttctttaaacttgtgaggccggggcggtggacttactgacatcctgtattctctcacctgcagctaggagaaaagatgttcactgtgctgacccgccaaccatgtgagcaagcaggttagtatctctcagcaggtagcaagcgtggttttgccaaatcgcaagagaaccccagcttcggcctacagtttttcatccatatcccctgcaaatgattgtttaactttattggtttgagactcagtactcagctgggtttcaacaccggcattcctcaaataaaagtaatgcttttcatcaaagccacacaaaacaaggactaacatgcatgtttcacttaaatggtttttccggtttgtataatccattaatttggcccttgtggtttcccttagctagctgtgtgtaacgtttgctttagaatactgtattgttgattttgtgatcaattgtacagtacttggatctttcctgtattcccatccaaatgttgctggcacagtgcctacaacacccccacccctcactgtgagtcagtgttgttatggttgatactgcaggcacaagtgcaggattttctcacactggaaggcacacacacacagacacacacacacacacacacacacacacacacacacacacttctaagcttgccccgcctgcctctagagcactttttggagttgctcatgtggaagcccagaaggctctggcttctccaagctcaggtaggtaccttgcaattaccatgtttgtccagccctaatgacagcacagctctaggctgcatttcctaaatgagtaagacctggtctcatccattttgctttgtaataagcttttctgcaaggacaagagtttgcttaaggtaatcatagctttttacttgaaaactgctgaaacacagaagacttaggaggccagccacgtagctgtggtcaggaaactgcatacatatcacacactcctcccccatggatagacattctttagtcatgcccctaaattgggtattcttgtcttccaaaaggatatgattttaggatagtaagggcaatctatatgaacttttatttttgtaaagggacattgcacttgaggagctgttttcctttgatctttaggttttcccccaaaacactttgaaatgttaacacagattgtaacgtcactcatacagactaacctgttacattccttccaaaggacaagtttaacttggcagattaaatttctaccccattttgttagagggaaaaaatcccttaaacttctataactaacactgacaaatgcattctttgaaagctaatgcaaaagtttgcctctgtggattaactggttcctgtacttttatttggaatcacagaaaagtgatacaggacctctttacatgctctgcaggtcaactccatggcagttggctctcctttccattgctattacccacaattctgtaatgagtaaccttgtgtctaagtcattttacacatgtggagctagttctgtgggataacttcccaaaagagtgattgtgagtcagatggcatgcttatttgcagttttcataaatattgacaagttgccctccattgatgctgtaccagtttacactttcaatgacaaggtaggaggattaaggtgttaagtgaccaactttgacaccaagaagtgtctgtgactgcagctacactgcaggggaatcagttgagatggaaagagttagctgttctgagccatgaagacctactgcgtgactgccctcctgtagcaaatgttgtgatgtgactgaatttgggggctgaatctaattatatcgtgggcgcatagacatgccctgttattcttctgggaaaatggcttacagaaataatggaggggtaaagcataggttataatgatctaggaataatgttctggaataagacaggatctatccaattgctgttcaattgatcttcctataatgatgaaaatgttatatggctgcactgtccaatatagtagccactagcccacatgtggttattgaacactggaaatgtggctagtaagattgagagactgcatttttttattttaattaatttacatttagatagccaattgattagatatatattggaattcgatgaatctagtgatctttctattagtgttcatcatatttcaaccatttggttgtcatttatgttgatgtcccaatagttttaccaagactattattattatttttttagagacaaggtctcactctgtcaccaggctggagtatagcggcacagctcactgcagccttgagctcctgggatcaaaggatcctccaacttcaacctcctgagtagcttgggctacaggtgtgcaccacatgtacagttgatttttttcattttttgtagagacggggtctcactatgtggctcaggctggcatctaacgcctggcctcaagcatcttcccatctcagcctcccaaagctgggattacaggcataagccactatacccagcccaagattattatttagtcagtattttcattgaatgtctttttatctttttaaaaaattaggtataacttctattcagtgaaatggatagatcttaagtcgtgcccctaagttgggtgttcttgccttctaaaagtatgtttttagaatagtaagggcaatttataagtttataatgtttttttaaaaggaaattatacctaagacactgatttgctttcattttcaagttttctccaaaggactttgaaaggtttgatgagttttgacaaatgcacacatccatatactccacactctgtatagcgcattgccattaccccaagaaagtgcccacatattccttctcagtgaatccctgccccaacttctgccccctggcaatcactattctgattcctgttaccttcctacttttgaacttcaaataaatgaaatcatttcagtatagtatagtactaatttttttatttttattttattttattgagacaaggtcttattctgtcacccaggctggtgtgtagtagtttgatctcaactcattgcaacctccacctcctggcttcaagcaattctcccacctcagtctcccgagtagctgggactacaggcgcatatgatcacacctggctaatttttgtatttcttggtagagacatggtttcaccatattggccaggctggtcttgaactcctgacctcaagtgatccacccacttcggcctcccaaagtgctgggattacaggggtcagccatctgcccagcctaatttctttttctttaactgagattatttttaaatgaaatattctatgagattatttttaagtgaaatattctatcacctggtttaattttttaaaaatagattttttgaatctccattaaaactaatgttagctgggcgtggtggctcacacctgtaatcccagcactttgggagaccgagacaggcagatcacttgagcccaggagttcgagaccagcctggccaacatggtgaaaccctgtctctattaaaaatacaaaaattggctgccgtggtagcaggcacctgtaatctcagctattcaggaggcagaggcagaagaatcgcttgaacctgggagttggaagctgcagtgagccaagatcacggcacagcactctaacctgggcgatagagtgagactccatctcaaaaaaaaaaaaaaagaaaagaaaaagaaaaaagtaaaacaaatgttattgtaattcatctcagggataaccaaaatatcagaaaactagaccatgcataccctccctgcaacactgttttagtacacaatttgtgaggaagggcaaataggtattgtttgtgcttccccaaaactggggagaaggggagcttatttgctactccatcttagaagtgtgggtctcgctaacaccagagaaggtggtttatgcacctgattatggggccagtccatcaattctacaaagaataccagtgcctggtttttacctccccctcaagtgtcttctgggtcttctcattttaggcctcaaggccctctaccgaactccaaccatcattgccttggtggtcttgcttgtgagtattgtggtacttgtgagtatcactgtcatccagatccacaagcaagaggtcctccctccaggactgaaggtaagtgtgaagggactggcaacaaagggaagaaatgagcataaaggggaagaaatcaattattccaaaaccatgagttagaagagcagaaaatcctttccccccatctctggctgaagccaggagaagttagtgtaagacgcaagggagaaggtctggacatgctgggtttgtgatatttgaggctacaaattgagggtagtgactgacaccttctccaaggactgtgtagtcttgctttgacttctgacttcaaagctaaaatttgtaaccaagagttgcagatagctatcaaagatttaccagttcagccaggtgcggtggctcacgcctgtaaggcactttgggaggctgaggcaggtggattgcttgagtccacgagttcgagactagcttgggcaacatggtgaaacccatctctatcaaaaaaaaaaaaaaaaaatttaccggttagtgcactttccattttgaccagtttatctgttctcccaaccacacaaccctgataatgagtaaagaccgaggctgagcacagtggctcatgtctgtaattccagcacttcgagaggccgaggaagaaggattgcttgagcccaggagttcaagaccaacctgggcaatatagagagactccatctctaccaaaaagaaatttttccaaaaaaaggaaaaaagaagtcaagaccaggagacccaggcacctcttctagcctaggctgagtgaacaaaaaatcaagaacttgagaaggtctccttgagctctatttgtgctgctactcttgagtctagaacatgtgctgtgttccttccaacacttccctcaacaacacccccccggcaaaaaaaaaaaaaaaattactcaggaccttgtgcttagtcccagaggcccctcttagttctcaacaagtccatccccaaatgatctttaggctcagaatcataatatatccccaggcttggctctgagggtgcccttggagacaggaggtgattccatgagaggctgacaagggaaagatgaagcaagttgatgagtccttcaatcattttgggtaggggtcagcaaacatttctcataaagggtcaaatagtatatattttaggctttgaggtccatttatagtctctgttttataactcttctttgttttttgactcattaagaatgtacaaacccttcttagctgtgccatagggaccaggtaattcagccatgttctttgaatctcatttaacatttacacttgacctcacaagtcttttccatatcttcctgctgttagtgactattcaaaggtaatatttgaaatacatagacatttttaaaagaaaagaaactaatattgttttggactctaaggatgggtttgagctaacattctaaggcagcttttctaaaagattagagtaaaatctccattagataatataatagcatttggttccttgataggatattttatttaagaatctcagccctcatgaataatgtgaattaaaaattaaaaaaaaaccttatgcaatcacccaataatgagaagaaagcaaattacccagttgtccaaagatattagctgaggcctaaaagaaggtgttttcccaagctccaggcactgccttctacaaactactgtatataaaattgggactttgggaggccgaggcgggcggatcacgaggtcaggagattgagaccgtcctggctaacgtggtgaaaccccatctctactaaaaatacaaaaaattagctgggcgtggtggtgggcgcctgtagtcccagctagctactcaggaggctgaggcaggagaatggcgtgaacccgggaggtggaggttgcagtgagctgagatagtgccaactgcattccagcctgggcaacagagcgagactctgtctcaaaaaaaaaaaaaaaaaaaaaaaaaaggaactgcaactaagagtaatatattttttattttttattttattgttattattttgtgagacggagtcgtgctccgtcacctaggctggaatgcagtggcatgatcttggctcgccccaacctctgcctccacagttcaagtgattctactgcctcagcctcccaagtagctaggatcacaggtgcccaccaccatgcccagctaattttttcttgctgtatttttagtacagatagggtttcaccgtgttgaccaggctagtcttgaactcctgacctcaggtgatccacccacctcagcctcccagagtggtgggattataagcatgagccaccgtgcccagccgcaactaagagtaatatctctttacactttgtatagtgctattcagttaagtcagcgcttttccctcattacatcacttagttcttatgccaaccatagaaggtggacaaagcgagcaccatgactgccattttgaaagtgagaaaatacaggtttggtcagtgaatgacaggtccagaactgaaacctggtcccttctgttcccaaggccagggctctcttcactgcctcccacttctccctgaccctgagttctgaatggagatcccaaatggagggaagggattggcctcagataagagaacacttcctgctttgcacaggatggaaaggtagggaggatgcatgcagatgtgggaaggtttgttgaattgaaggagaggagttaagcctagtaccacccttagaccctgatagctgggctgcctgccctgggccccacatttcagaaggaccagctctagttgcacttcaggcttatctctctctatgacccaaacgaatgtgtttacccagagcccatgtttccccttctagaacacactgtggtgcccaagacttcagaatctagggtcttcgtggacctccagaaggtggacatcaccaatggtctgaggggtggccaagaggcagctgcttacagggagtgtaaacagagcatagctgtgtggtctgaactgtccacacacaggtgcatgggctctttattctgtgagaacaggtttgggaaagggacagggcagaagcctctattcataaaattttgtctctaatcctacaaatgttagaaatgggctggttaaggcagttgccagctgatggcttctacttgttctggacagtaacaggcaagtcctctgttcaaaatggagagacatggaggaatcagatggaagactagtaaaatgagtagataaaaatagatccctgggcagtctagagggcactgttgaaggagaaaaccacacatgttgaatgctactgtcttaggttgggctctccaagtcaaagacatacgtgcaagtagatcatctggggatgatcccaggaaacactggtgagggactagggaactgagatgggtcaggcagccaagagagggcctgctatgcagcaggtcggcactgtgggcaactgggactcagtcctgcttgagaccctgtgagctggtacagagaactcaaagttgtcccatatcaaggggcatacaggcatgtgcctcccagatatcccagtcaagggcatatttattcaccagcttccatcagtcattagctgagaggctgctccctggatgttaactctctagtccttctggcatattttgtgatcaggtagactcgggccactagttaagccttcaggcaggtggaagatggatagttctacatcacagtagtaaggcctgaggggatgtgggcagagaattgtcagtgactactccatgtaaataatattgttattatccctgtattgcagatgagaaaacaggaaaagaaagggcaaatagcttcccatagttacacagattgaaaatagcagaactggtgtaaaggaaagaaaagagaacagacaacagtggccttaaacaagggtttggaggaaccaggagacacaccctccaccaatcagcaggcagttcaaagaggggattttaaatctcttctgaatcttggtaacagaccctagccaccattgcaagggacaggaaattgtaaaacacaggaagatgagctcggaaggtccattctgcttaattgggtggattaaatgtgagaaaagacagatgttctgggccagttgaaccagaaacggaatgacagctttggaagagagtgttccacatgcagtttttctcaggatatggagagatctctctttttttgttttgaagaggattgcaggtgatgaagttgagcaaatatgagggattttaaattatttgttatgtttatttttttataccatgagccctgttttgctttcgtgtgcagctgacagttggttctaaagggccagctctacaacagcctgtctggagggctctgaaatgttacagaggactctcatgcaaggtcgtatctggctattaaatctaaccttggcttgcctaaccctggtttatgtgaggttatggtcagaactattaaaatgcagtcaaggggcgaaaatgtctgagtctcttgtgttactggtctgacttgctccacaagcttgaagagtaaacatgatgccatcacttgtaattttcactcggcccccagtcccccgctttatcatcatgaagtccaataccttcctcttgaggcttcaccctccctacccctaatcataaccatccaagaactttagagcttctcagtccaatgatcaatactattgtactgcctcttgcagccatgtgatgtcactgttgaagatgggttctgcacagtctaaaggttttaaggatgggcttttccactgtgacctgctcagcccacattagttccccatactgggtccaagatcataagccattttagtctacactcccatgctcagccattactctccaaagcaaaaccactggcccagtctgtgttgaaatcattcccttttaaccctcattgagccttgctcatcagcctggatttctggtgccttgtagcccaccctggtctacttcttggagagtaagagttggataattagtttcttttttttttttttttttttcagaaagcctcggtctccttatgcaaatgggtcctctcctccagccagatctgcacaccccttaactaagactttactttcaagggactttttgtttaaataagaaagtctgcaatgcacctgattactgaacagtcatgccattacacttggtttccttggagctcagtgaaaacatcatggctatgattactgaacagtcatgccattacacttggtttccttggagctcagtgaaaacatcatggctatgagtacaggttttagagtccgttagactcaggcttgatcccaggtctgtgatcttgggcatttacttactactgtaagcctcggtttgcccatgtgtcgaatggtatgatatgatatgatatgatatgataacatatgtcttatacaggcaataacacaaagcactttctgcagtgcctagaataagtgcaggacaaggcttattactactactatttattatcatagtaataatgataataataataaacaaatctaagaaagttgaccttatgcttctgctttcgctattgctttagacagatcacacaatccttaagtgttggaccaaggagactggccctttcagttaacattaattgcattcactgttagatacagagtaatttaaccagtttccttattctatacatttctaaactgaaagactgcttcctttcagttaatccactgtgtcttcagatccacatttgagccatggttttttctgacactgcattagacagaggattacttactactttttatccgaacatcaccttgccagctgaactgaaattcattcccatcccctctcccccaaaagaatcacactgagtttcactgtttaggcaaaagagctctgaaaactggttaaagaccatttttcccacttttgaaaatgtcagtgaatgatggtagggctagatccgtgtgagtcggtagaggtgggcctatatcagcaggtgccggagggacagccatttctccagtctcacagagcaaagtctggctgctgcagaccctggtgaaagctggatcccagttggagttacaaatgagaatggatactcttctctctgatcttggcccagcagccctgagcttcagaaacacaggaaaaacatgcaccctttttgaagggttggaataaagatttgaggaaaggaaggtgacagtttttctcctattctctctctcctcttgttttatggttcagcaccaggcgtggcagggcgggctggagtggtggtgatcaggtcaggagcaggggggaggaaagaaagcagaccaagaatatagaggcctggacctctttagtttagtgcctggtttccttcttgccttcagtttcaacctgtactttaatctccctgtgagtcgctgcctgtgacagattatgaacaatgccacccttgttccccatgagggatgtcaggtcaggatcctgatcaacattcatcatactgaagggctgagattaagaggctgtccaagttcacataccagtgaacacagatgttctatttcaaaataatggagaggctatgattcaggagctggagcaactttttaaaaatatggtcccatttcaaacaaaacaagcatttgtaatatagataataaaaagttggaaacctcctaaatgtataggatcaggaaattggttaaattactctgtacctaaaagtgaatacaatgaatgtatgaaaatggtgatatcaatctgtttctactgtcaggaagacatgttcatgatatacttttaagaaaagagcattgcatggccagatgcggtagctcatccctgtaataccagcagcattttgggaggcggaggtgggtgaatcacttgagcccaggagttcgagaccaggctgggaaacatggcgaaaccctgtctttacaaaaaatataaaaattagccaggtgtgatggtgcacacctgtaatcccagctactcgaaaagctggggctgagaatcgattgagcctgagaagttgaggctgcagtgagtcgttggtggcaccactgcatatatacaatgatatatgtatatatccagatacatatatacatatattgttagaaaagatacaacaagggctaacgcaatagttggatttgagggatgctttgttttcttttctgtttttcttgttttgtgattttatttgtttcttttgcttgactggcttttctatatatgctaatagcctgtatttatgagtagccattaagcattaggcatatagccttctatttacttctgcaagtaagtcctctaaagatgagggaacccagaaaggttaggcaacttacccagtccagcatcataaaatcgagaatccatctgagtcagcttgcctccagacccaacttcatcatcttctgtgggacaggctaggttaacccaaaggtggtgcggtgggagacttcaggccaccctgaaggcctctggatgccctaggatgactctgagcacaaacagatacggggcttaggtatgcattgctaattccaaattctataggctactaatacatgctctttcctggtcaggtttggtccagagcctgggctgggccaaacctgcaggtgaaactttctagtgcctgctcaagttggacaaattggtccaggactctcagcctactctcctgcacacagccagccccagcactgcccagcaacacctgcctgttcatttgttgacatacacattgccaaagtgtgatcaatatgtcaatattatttttttattttgctttttttctccttaattatgaatactttaattctgagcactgatacaggtattaacatgcctcagccgggcacggtggctcacgcctgtaatcccagcactttgggaggccgaggcgggtggatcacttgaggtcgggagtttgagaccagcctgcccaacatggtgaaaccttatctctactaaaaacacaaaaattagccagggatggtggtgggcacctgtaatcccagctacttgggaggctgaggcaggagaatcacttgaacccgggaggcagagtttgcagtgagctgagatcgtgccactgcaatccagcctgggtgataagagtgaactgcatctcaaaaaaaaaaaaaaaaagaaaaaaggaaatgcctctaccctgtgaaaaacttcttataacttcttcctatgcttttattttggttgtttatttttagactgataagcctagaagtttggaaatagagggcatccaggtgactattcattttccgtctgagacgaagatggcttttgtacctctccccagaggtctgaatgaggaagaatcaggcaactcaattgtatgcaagatccatcatgaagtacaattctcaaccttggctgagtgttggactcacctgggacttttaaaacctgttgatgcctgagtccactctcagagattctgatttaattggtatggggtgtagacttggcattgggggattttttaagctctccaggtgattctaatgcattgcaaagtgataattatttcctagaacctgccctacctttcctcattcccttccctcacaatccaaggagacaaaattggtttggagaaaataatttttcttattgattagcccttccctaagcgaagcagtgtggattaaggtactcagggttctcagtggcccactgagaaagcagtcctcagaggagtcccgcccattctgactctccctttccctttttattcagtatggtattgtgctggatgccgggtcttcaagaaccacagtctacgtgtatcaatggccagcagaaaaagagaataataccggagtggtcagtcaaaccttcaaatgtagtgtgaaaggtaaggactgaagtgtgtctgggagtcacaatgggcagcaaggtagagttctaagtgttttggaggcctggagaggtcctgagatgttgcttggaggcagggaatgagcattggactgggagtcaggaaataggagatcgtgtgctagtgctgctactcatcagtggaataaacttgctctagtcacttcccttctctgggcctcagtgttttatctgtatacatggaaaggggtggcgtcaagaactgtgaatggtctgagattttaccctgccatattttcatgggtgctggaagacacaagactcctgggtcagaaataaaggacaatttgttactcacaggagtagcccagagtatcagcattttcttatactggttctgattcccaatttgcccaggatgatggaaagacggacagatagtatgcactcatgcaataggttctgtcataggaaaggaaatctgggattttagggaagcatttataatgggcagtgagcatgcctgccttttgctgtggagggaaacacaagggacacatggatagctgtcttccagcagtgataaggagtagtcctgtgtattgatggcgaggcagacagagaatgacaatatgtaaacaaatggacatggctctgttccagtaaagctttatttatggacactgaaattttgaatttcatataattctcatatcatgaaatgtaattcttcctgtaaattttttcccaccattaaaaaatgtaaaaactctcttagctcacaggctgtacaaaaaaaaggtggtatactggatttggcccatggggtgccaacccctgaaatggagtattatcagcaatgataattaatgatccgccatgcagctccctgtcttttccacaacatattctgagttttatattaactgtttccttgttctttatagttttgtcttatgtatgtagtgtttctgttttttaaaacaaaattaaacatgtatttatataaatggaatcaacatattttatgccgtatttgctttgttcactaacaacattgggtttttaagattcatctgcactgatatgagtaactatcttgttcatttcctttcctttttttttttctttttttttttttgagacagagtctcactctgttgcccaggctggagtgcagtggcataatcttggctcactgcaatctctgcctcctgggttcaagcgattctcctgcctccacctcccaagtagccgggattacaggtgcctgccaccacgcctggctaatttttgtatttttagtatagatggggtttcaccatgttggccaggctggcttcgaactcctgacctcaagtgatccacctgcctcggcctcccaaagtgctgggattacaggtgtgagccaccgtgctcggcctcatttttccttgttgatgggcatttgtattttcttggttattaataaaacttaatatctttccatatatttataggcatttctgttttctgtgaaatgcatgttcatgtcttttgttcatttttctattgaattgttgaatttttcttactaattcattgaaattctttataaatattctaaatatgaattctttgccattattattatcatattattgctaataccgtctcacagtttgtagtttgtctttttagtttctttgcgatgtgtcttgatgaaaagaagttcttgattcttatgtaaatacaaccatcaatattcctttttgtggcttgctcttttgtatgttttatttaagaaatccttttctatcttgaggtcatacagacctttttctatgaaaagtgttataattttgccttttacaattaagtaattagtccaagtaattgagcctagttagggagtgtgtatatgtgtaagcctttttcaaagccacttatcttcctcgttcgagcattaggatcttcagttggcctgtagcctcccaaccagggtgttctgaatgtgcccagtgtatccttgagcccacaggacaacaggttagagactccagacctgtcctcccagcccgagcagcctcctttgtttccctccgtgagctgccaaaacattgtaagttcatggggatcatggcattgaaaaacttggaaagcagagttagtctttctcaccgggagaccaagagtcttctttggctaatcagagtgaattctgatcatctgccctccgaggagggcagccaggagcttgcctaccctgatgcacaggtgttccaggttaggctctccagaagcagatgtagagacagattatggagtgcaaggtggttattagagatgcactattatagcagaaagtgggcagagagaagtactggacaaaaaaagagaagtcaaacttcaactcaggcctgatgaagcttcagctgatccgttatgctgcactgggttgaaatggtgtaaagtggcttggctgtaataccccctgttgctgccactcttggatgtttgccaccctggaaagagcaagatcttgagcaaggcagctctctgcagctcaggcagaccctgaagaagctgacagctgggacaataagtctatttgaaggggtatattgcacggcacggttttggattcaccacataagggacttggatattttcctttaatttttttttttttttttgagatagggtctcattctgtctcccaggctggagtgcagtggcacaatcatggctcgctgcagcctagacttcctgggttcaagcagtcttcctatctcagcctcctgagtagctgggactacagacattgccaccacatctggctaattttattttttgtagagatggggtctcactatgttgcccaggctggtcttgaacttctgggctcaagccatcctcctgcctcagcctcccaaagtgctgagattacaggtgtgagccactgcacccagcggatattttctgagtattgcttgcttgttatccacaagatgcaggcagctgtagccttgctctgacctcaaccagcgatcctctatctgctcaggtaatgcctgagccatttcctcaccttcaaccatgaaatagggcagcaggctgctcctttcaaagacagagactatgtgctccaaggaaagagaagatagtgtaggatcgagattgagacttcacctcatccctactgtgtgaaccctggaaagttatctaacctgagtcttgacttcctcatctctaaagtaaaaaacataataatagttatacctaccctacaggagtgatttgaagactaaatgacataatgttgtaaaagaaatgcctggcatacagtaagtgctcaataagcattaactgttattcatggggcaccacaatcagagctcctggtggatcctcttgccacttgttactctgtcccacagttacaagatctctgtctttagacccaggagggcaattcaaccaagttagtcctgatggccttacaactgtggggaaaaataagacttacatggggaggtgttatggcagtccctcaggggaagggttccttggcccaccctggatggcatatgtgatttgaggaggcacagagtcatggaggccacagcatatccataaatggatcttcccttctttgatcacagtagcctcagggatctatatatactctgaatgaacagaagaccacaaactaaagctcaaattacagagttgaaggtcagcaagtgtcatcccctcaaaggcttgtggcttctccaaggataatttgggtttctgcttcctccattgcaaacttcccaggactcccctgtcttggccaaacagaagggggtgatgaatgcttgctcacccagcagggattcccagatgcctaggccctcagaaatttctttctggttggtatcaacccccagttgctactgttttccatgagttcattgcctttgctggcggtttctgtgctggtgtctgtacctctggctgcttgtggtgaagccacctcctggaggtgctgggttctctgcatgcgtctcatctcatctgcagtactcatgcctgctgctgcctttccccacaagggacattcataatgtctttcctttaaaccagtgactaaaaattacttaagctccactagagcctaaacttaactatctcctccattaaaatccctcaaagagttgcatcagaaaccaggccaccatagtattaaaaaaacatcctttgcctctgggtgcagtggctcatgcctgtaatcccagcactttgggaggtgaggcgggtggatcacctgaggcaaagagtttgagaccagcctggccaacatgatgaaactccatctctactaagaatacaaaaattagccgggcttggtggtgggcgcctataatcccagcttctcgggaggctgaggcaggagaattgcttgaacccagaaggcagaagttgcagtgagtggaaatcatgccactgcactccagcctgggtgacagagcgagacttcatttcaaaaaaaaaaaatcatttgccaatagttggccggagctcaagctgaggtgcgtgtctttggcttctgtttcccctcaagtaagttttgtgccgtctgtttaaccctctctccccatattgaaatagcaatttcagtgctcctctcatgggaccaagtatccaagtccaagcagcttagaagcctgtgaatcctatctccttttccctctagaaggcttaatggaccttatgcaaacaggctgtctggtgacatactcccaaggtttcaccattctatctcgcctctcaccagccgctaaccagagaccagctccttgcagattatattttgtttatcccagattggactagccaatctccttactacagagatgtatagtggtttgaaagtctcattgattgattgatttaataaatatgtattaggtgcctgctgtttgatacgaactgttcttggcaccaggaattcagaaataaacaatatatacaaaatctgtggttatgtgttatgagacttgcattccaatgaggaagatagacaaaaaaataaacgggcatataacgagtgtcaggcagacatgatgtgaagagaaatcaggcagggcaggaaaaagagagtgatcatgctgttttgaacaggattgtcagggaagtatgaagaatatgacagctaggcagagacaaaagtgatatgagacaatgggccatgtaaatgtgtgggggaagaacatgctgagcagaggcatggcaagggaaaaggccaagcatggaagctgctcagcattttccaggaaaagccaaggggccagtgtggctggaagaaagatgagaaatgagactgaagctagagccaaggcctgctccttggagggacttgaggtgtcctaagggtttgactgtgacacaaatgaagtttcttcaaagtatattgggaagccattagaagattctaactagggaactaatacgatatgacttctgtttttaacggatcactcagttgatatagaacacgtagtcaggggctaagattggaagcaaggacaccagttaagtgctgttaaatcagtacgggtgagagattaggtgatggtcaatttgcccttgactagtgcttctcaacacaaggtgaatttgtctcccgggaaacattttgcaatgtctggagatcttttcgattgtcatgactgggtccgtggtgctactagcatctagtgtatagaagacatttctcatctttcttccagccacactggccccttggcttttcctagaaaatgctgagcagcttccacacttggccttttcccttgccattctacaatgttctaagcattgtacaatgcacagaacagcctccacaacaaagaattatctaccccaaaatgtcagtagcaccaaggttaagaaaccttggtttacgatggttctggggaagggggtgagaagtgcttagatttgcgaggtattttgaaggtaggaccaacatgattttatgatggacttgatgtgaggcatctgagttcataatgcatgagcaagagtttggatatgagcaactgtgtgcatcacaacaccatttactgagattggggaacactgggagtggagcatattgggggcagggcaaagcttaaagagtttggttttgggcatattaagttggagatggctataaatcatctgagtcaggggaggcaaactttttctgtaaagagctacacgataaatattttagacttgtgggtcatatggtctctgtcgtaactgctcaactctgcccctttagcatgaaaacagccatagacaacaggtagatgaattagcatgtttgcatttcaaaaaaaaaaaactttacttgtggacactgacattttaatttcttataattttcatatgtcatgaaatgctgttcttcattttatttttttccaactacttgaaaatataaaaattattcttcacttgcaatccatacaaaaacaggtatggggtcaaatagcttgctcattcctgatctatacagtgatgtggagttgtcagataggcaagtcgggagttcgggggagggggaggatgaagaaataaagctgagtgtcatcagaatacagacgatatccagccccagctcatctaaggagtgaatagatactgaagaaaagagatctgaggacttagccttacacactccagtactgagaggttggggagaggaagaggatccagcaaaagaacttaggaggaatgacagccagtgaggggagaagaaggtcagaacccaaatccaaggtagttgaagaaagaggaagtgcgcaattaggtgaaaagtgatggggagcttataatctaagaagtcagacagacatgatatgcccccagtgcggtgatgtacactaggaaaaacctagcacacctaggaagtgctcttgccaaaaaatcaaatctgaatctgatcacatttctagaaattaactcccagtttataaaaaacacagaagacaaaggaacatgttcaaggacacctcacggatccaatcagcgaaatccaaaataagagacctactccattaaaatgatttctttaataaataaatggcaagataaaaggggggcaggaaaactgttacagaatgagaatcttaaaaaacatccaaatgcacatacaaggtatggactttggtttctgcatcacactataaagaaaaagttattctgggaaatttgaacactgacaggtctttaataatattaagaacttttttaggagtgatttttttcttaggtatcatggttatatttttcagagttcttccctcttaaaaacatatactaaagtgtttgtagatgaattaacataatgcctgggattttctttacaataattcctagagatggaaaaaagaaagcatataaatgaaaataagatgggctgtgtattgattaactgttgaagctgaatgatcagtatatggggattcatttcactagtttcacagtaaagaattaagactaatgtgagcactgacctgtgatgttcagcatagttttgttgtttttgttggctttattggcattttggagagaaaaacctgttaactaacctatctcataggaatatgcctgagagcttaatctcacattttatttactgagagaattgtgtgtctttttaaaaataactttctaattacaaaataatatattttcattgtgtgaaaatcagaaaacacaggtaaataaaatggaaccaggcacaatggtgtgcacctatattcccagctactcaggaggctaaggcagaaggatcacttgagcctaggagtttgagaccagcctgggcaacatagcaagaccccatctttatttaaaagtagaaaaggaagtaagatcatccataatccttcccaccagaggggaacatttttctttttttaggattaatatatttttatattaaaaattattcatacaggctgggtgcagtggctcactcctgtaatcccagcactttgggaggccaagtggatcagctgaagtcaggagtttgagaccagcctggccaacatggtgaaaccccatctctactaaaaatacaaaattagccgggtctgttggtgcatacctgtagtcccagctactcgggaggctgaggcaggagaatcacttgaacctgggaggcggaggctgtagtgagccgagatcatgccattgcactccagcctggacaacaagagcaaaaactccgtctaaaaaaaaaattatatatacatacgtatataaacatatatatttatttaattgttgttattgttattagtgtttcttacagctacttcagttctgaactcctgagatcaagccactgagttcatcaagcccacggcttatggtgctgtcatttgtctgttgtaggaggtcattgccccaggagggaaaattacattagaggctctgtccttggccaaggttgagaaagcctgtccttgcttctctagcactgtcgatgaaatccacgtctgtgcatcttaatggacacatccaagcaaaacttgtaattacaatgctcaggtttttttattggtttgtggtagttggaagatgggtgggaaaggttaagaaagggcagctgaaggaggcagtggctctatcaattccaaagaaggaagtttccagagggaccatattctctccatcttccttgtctgtcctatactttgtcttccttaaagtagacttatttaaactcagagcctggactgggagaacaaattaagttatgttcatgcaatggcatgcaatgcaactgtaaaaagaaatgaagaatatttatatactgctatggagtggccactaggaagtattgttgaatgcaaagaaaaaaaaagtggagaaaagtatatatagtaaattaccatttatctaaaagttggggtgattaaaaatatatatttgcttattttaaacaaacattggttaaactttttttaaaaaagaaactacttacaggaagaggagacaaggagagaatctagatgtctctgaatatacctagttttgtagatctaattttagaactacttaattattttagtaactataaaacaaaatcgttttttaaaaagtaattcctaaaactcaaaagtaaaatgcaacaggccagtcatggtgtctcacacctgtaatcccagcactttgggaggctgaagcgggtggatcacttgaggccaggagttcgagaccagcctggccaacatggcaaaactctgtctctacaaaaaatacaaaaattagccaggcacggtggcacgtgcctgtaatcccagctacttcggaggctgaggcacaagaatcgcttgaatctggcagacagaggttgtagtgagccgagatcacaccaactgcactgcagtctgggtgacacagtgagactccatctcagaaaaaaaaaaaaaaagagaaaaagatatcactatttgcaacccctaatgaaataatggagctaaaccattatcattgatgataacagcacaaaaagagaaacaaccagatactgtgcctcctattgtaagtccacactaatccctatatattttttttaaatttcaaacctgatctgatcaagcctctacattcagttaaccatttatagaaatacaagggaccaagtaagatgttaattgaactatgagggtacaatcgacaaactctagactgtggaaattcttcaggacgaagaaattgcaagtaaaatttttaataattaggagaaaaatagaaagggaaggcagaactaatagacagaaagagacttaagattgcactgtaccgaatttattgggatcctgactcatacaaatgagaagagggtgatggatgaaggaagaaggagggatgaagaggaggagtaggaagagaaagagacacagaggatgagaatgagaacgaatatggaggcaatgggaaccatgactggatagttaatgatattaagaaattatttttttggcaaggcatggtggctcatgcctgtaatcccagcactgtgggaggtcgaggcaggtggatcacctgaggtcaggagttcgagaccagcctggacaacatggtgaaaccgtgtctctataaaaaaaccaaaaattagccaggcgtggtggtgcacgcctgtaattccagctactcatgaaactgaggcaggagaatcacttgaacctgggaggtggaggttgtagtgagccgagatcgtgccactgtactccaggctgggcgacagaacaagactctgtctcagaaaaaaaaaaaaagaaaaaaagaaaagaaaaagaaattatttttaatttgtacaggtataataattcaactgtagttagggctttttcaaagaatgtttactttttgtgacacatactgaaatatgggaattaaatgacacatctgcattttgctttgtgggaagcaagtggaagattgtatggatgaaataagagtcgatcattgttgaagctgggagatagatgcatgagtttcaatatactattctctctacttttatttatatttgaaatttttataatgaaaacatttttttaaagtaggccctggcttactttttatacaattgtaattcattcttttagaggttgcaagtatactgatcagtgtgaccatacgggacttaccacatccagctgttttcgaccccctaccaaaccccaataattttcaaagccaatttgttttttatttaaaagttgtatcactgcgattggttcctggaaatgctgacagatgctgactgcttgcttttcaggctctggaatctccagctatggaaataacccccaagatgtccccagagcctttgaggagtgtatgcaaaaagtcaaggggcaggttccatcccacctccacggatccacccccattcacctgggagccacggctgggatgcgcttgctgaggtaaaggctaagtggcacaaaggagcccatttgaccaaaataaccaagaatatgttgaatcttgccaagaatgtaactctatttctgggaacaaccctcgccccccaaaaagaagcccacattctgccataaatttgggctttaaaggttgggaaacttttagtttttattttaatacccagaaagaaacagttctaaaattgtttccctctcccttggtgattttactgagaactttgaaaaagagagaggtcatatgaaatctgctcatgggatataactctagttctttgaaaagtagttgttttgacagttggcatttgacacctgtgaacaaccagctaagtttggtagtaagtacaacccatagctatgtagcttccgcttgtgtacaaaataccactgaaatctgctttaaaacaatggcatgtctgcacctcaaatcagtcaaagcttttggagttgttatgaaacaagcatctaatttcactcactcaaattagttccttctaaatttgtagtcatggcttttagcccagttgcattgtttttgaatgtcttttctcttttttctccattatagcatttccttgaccttgaaatttcaaaaaaaaattccaaaaagaaacaccaaacttaaatctactcagagtaaaggctactactccaagtgttggaataaggttttatcacaagaaaacaacactcattctgcttcagagccactttatctacgattccaagcacgcaaaattatctatgtctgagcattaataaaaaaagaacaaacagagctcctttaacatgataatgaaaagaaatcatgatgtgctctccattagactgggccttttccttatagtctcataattcttgtttctaatctgatttcctggttgaccacattgaatgtggaaggaagtcagatttctctgctcactcttggaatctgcagtgtatttccaaattatttcatttacgtgtaatagaaatgatctaaaaactccttccttttgctttttctttcttataaaaacagttcttccaaaaaggatggaactgaaaccatgtaatctcagagaacacagaaaggcagcccctttacaggctattaattccatggacctaaaatcctcatctgctatagtggatgcttccttaacacgacatgtgtggagctacttatagaaaagccagctgcaggatgtgctcatgaagttttcaatttggagactgaatgcttagagcttagtttgtgaaatccttctgctttcagtctattcaattcccattttcagactgaatttcctatttcagaatacattaggatgctgtttactctccctgggacttgacttcaggtaataagtttcagaacaggacctgagcaataccaacaatatgaatgtgataagtgactacaatcagggagaaatactggttcaattccattaaatgtctgtaaaagttactctaaaatatctttgctttaccagtagtgtttgtacatatgtaaacttcttggttgaactggctctgaacttatgacttaagtagacttctagtactctaaaaacaaaaacaaaacaaacaaacaaacaaaacagctcttaagaaactgactttttcttggttgcttcccctccctcccccagtctttcagtgagaaataattaaaaggctctgcaatttacagctcatgacaaaaaccatggaacagaaagctcacctcttaggaaaaaatgaatgtctcctttgaataaattaagtactaactctttcttgtaaaactgttttctaatgatgatctatttcttctgagaaactagctgatattttaattactagacaagtaaaatagaaaagaaaacaattaatgagaattagctgggatgagaattgatgaaactgggaaaactctgaattattttccaagaagtgataattggccacggaattggaatggatcctgcttatagccttgctctttcttcttcctgagccaagagtcagccagtgcccctggctttctacccatggatgaaagatgaaataatctcccaagtgagctttctttcatagggtaaaatggcagcagatggacgccataacattctgtcaccagggatagaatgctgtgttgccactcctctaagagtcagcacaccaatggtttttcaatccagtgacagccatgatgactgtcatatcccttcatgctgaagccctcccaaagagtgaagcaaaaacagctaaaaactcaatgttcttcctttcccccttcctactaagctccctttccgtctggtcagatgagggttccttcatatggtgcctccaagagattatttatgccactcttatgacttcatcaatcccctttcctctgctgatctaagacagagcaatggcagttaaataggaggctcttttgatacatgaacagatgagatgggtggggagaacaaattgtacttatgctgaaagcaattttcctgcttggcagtttgacaggtaacaagtgcatcctgccttcacagttgccccagaaggcttcaacttgcaaaagggattgtggtgtacagcacacatctggaaaatcattcatccccaccagcagggagacggtgaagtttgcattttcacctgagtgagactatgtattttaagactgtattgtctgggcactcagacttgtttgttctgtgccttgtacaggttgcaaaatgaaacagcagctaatgaagtccttgaaagcatccaaagctacttcaagtcccagccctttgactttaggggtgctcaaatcatttctgggcaagaagaaggggtatatggatggattacagccaactatttaatgggaaatttcctggaggtgtgtgcaaacaaatgcatggtttttaatcttactgtttatcctatcccctgtgagtgatagcctaagtagaggtacatgccatcagggatatctgccctgtatcactcctaccatgtaacgcattagggaaatacctatgagacaatagctaagaaagacatatatagctggggagaaaacatggtcataaacaggactaaatgctagggagggagggaatcttgtcactttactagcttgtaagaaattgaagggggtgggatctaaatttaacactaggctatgggtctttgggagggcagttgaagaataacccttcagagaggctccatgaccatctgaaatgtacaaagccctcaggaagtctgtatccctaagtccccagagacaggaggaggtcttcactctgtgttcccaggtctcctcacagtccaatccctgcactccctgctcccttggtgcagaggaaagttgactccaagagacaactgccatgttacagggggcacaaaacaggagttactcagagcatatccagcccaagacctattttgttcaccttcaaatgtattttaaatttttaaataattaccaacaattaacatttgggaaatttcacataaaaatccatacttctagcttcttctgacctcctcactcctcccaaaaatcggaggaactggtcacagtagactcacattcctgcacggtaacaggaacagagtgtaaatcatggactctccagtttgccacagacccaccagtccctattatacacctaatctacttcactcatttattacttacctatgttacctgcccagttcctgtaagcattttaattcaccacctctaaaagaaaaggaaagaattggcctcacatgctccctctgtcctacttcttagtaataggagacgaggcttgggtggagaactctgggcaaacagagatggtgcctttggctttctttctcacttccttttcccactgtgcagaagaacctgtggcacatgtgggtgcacccgcatggagtggaaaccacgggtgccctggacttaggtggtgcctccacccaaatatccttcgtggcaggagagaagatggatctgaacaccagcgacatcatgcaggtgtccctgtatggctacgtatacacgctctacacacacagcttccagtgctatggccggaatgaggctgagaagaagtttctggcaatgctcctgcaggtacttgagtcgggggtagggggtggcaggtgttctcttgagggtttgagctgaggggagaatgccctgccttctggggtctgtcctctccacttcaattgaaaggtagatggaaataacagcattttccaatttactcctgggggtccaagtccctttcctctctgtctctttcttcccctccgtctccctctcatgttgcccacttccagtaaatttgagtaagaagtctagggaagttccagagcttcagttgttttgtaaatgactcaagacctggaatccctttatggacacaaactgttttaaaccaggagctaaataagcctgagaattttgagactcccctgggtgtagacaaaataatattagtggtcacaagagaaatgtgtgctgaagggggagagggcagagcccttcccaggctcagcctccttttagatgggtctatattaggcagacttgatacccttatatggcagaactttagagcaaccacattccatcatgttgatcagtaattcatttgataagtgttccagggcccagaaggctaattcaggcatcagctagaaagctattgctaatattaaactcaacattatgcagtgtgtgttcatgagggcactaactccacaggtgagaccccagacccaaacaccagtgctcaggggacatcaatcttagccatggctgggtggctgagaggatgggccttgactgcctagaggggtatgaggaaatcagaagccacagatcctggcttcttatgggactcaaaggcaggggaatcagcctatgaacaaaatggacacaacttcagtaggttaacccacgttcgtccaacctactctgataactgaagacaggaacagactctatcctgcagaggagttgaagggatcacaaaagtgcatcttcagcaggactcacaacttcagacccctgcatttacccagtgttcatgcagggtaggttgtgggaactcagcttccagttctggcccctcccccaaacatctccccaatcctcccagaaatggctgaggccccaggacacatgcatgggacatttattgtcaggagagtctgagcactgcctggaaaggacagatgtgagaaccctgcagacagccctcaactacccttctgtagtaatccatgctcacactactataaagaaatacctgaaactgggtaatttataaagaaaagaggtttgtttaattggttcatggttctgtgagctgtacaggtttctgcttctagggaggcttcaggaaacttaaaatcatagtagaaggcgaagcggaagcaagcccttcttacatgggggaataggaggaagagagagagtgaagcggaaggtgccatacaattttaaacaaccagatctcctgacaactcactcactatcatgagaacagcaagggggaaatccacccccatgccccaatcacctcccaccaggcccctcctccaacactgggattacaattttacatgagacaaagccaaaccatgtcaccttccatggctcccatcccaacttccacctccctgcccagtcagccaaaccaaaccctacaggtaactcaatcaaccctccctatcaggggatctcaatactcaccactcatccccacttgctcatcaaagtagttcaaccaacatgcttctttctttctgggagagaagctctggaaaatcctcttttctccagctccttttacctctagcaatgcctaatgtcctttgctccagctctgaccctagcaggggtagaatgtggaggctcaggtgaaatcctcctttttccagggtgagtgaggatcagagaggctaatcttttaaatttggctggccctatggaatgtgtgtgtttctgtctgtctgcgtgcctctgtgtgtttttgtactcatacaatgtttactaaagaatgattatctatgtatccagcagtccacagagaagaagtaaatacttcacctttctgaggtctgatttaggcttgagaatgccagtctccaaatgtgagcccagcactggccatggagaagtgagcacccagcctctcacagtcagctcacagggacagggacacatgtcttcaatttgcatggtaacctctagatgcctgatagggtggctctgccctcagaggcttctgactcatgcaagaggagagacccagatgagatgaggattactgacaaattcatgtcaagactcacctgaccaacagtttcataggtcaaatatgtattgccaagccctgacttggaaggttcacacaaattattgcattgtaaacactgactgagtaaattccatcagtctggatcttgtttcctcatctgtaatataaggaactacgtagtgtggtgagaatgatagctggatatgtactttgcaagttactttcttatcaataagtctccagtcaccttagagctgaagtctcactctgacaacatgttagatattaggaatgtgcattcactttctatctttccctttttaagtaagaaatttttcttctgtttttaatgtaatatatgttcagtgaaaaacatttaggagatgcacaccaaaaactataaaggatttatttaaaaacagaattaaccactattaacatactattgcattttcttccattttttaaatgtatgaatgtgtaaaaacttggcttcatatggtatatataattttatatttaccttttattttacctaaccatatattatgatcattttcctgtgttgttaatgtccttttaaaatacgattttttatgagagcataatattccaagtgccataacttaaaaagaaaaaaaattgaccattcgattatgaaagaaagtacattcttattgtaaaaatttaaaaccatagaaagagtgttaaagtcaaaatgaaagatcctccttccaatcccatttactgaatgccatcactggtcaaagcttaatatgttgttcttctacactttccaggtcagtatattaacttattttctttactatttactatcccataatttatcaatcataccctccctcatggacatcaggctatgtcctgttttgttgctacaacaataatataataagccttcttactcatataatcttagcgattttatttctgtaggacaggttcaaaggacaggtgtatttttttatttaaatgaacaaataggtaatcttccaacaaaattagaaccattcagattaccacccatgttgtgatgactttttgaaataagcttcaggaattccaaaacattctaataataagtacttagataatgaggatctgtttctggattttctgttctatacattcatttttctattttggggccaatatcatgttgttctacttgcaaaagtctatttttctactctcagaggtttattttgaacttcaaagtcatttgaagcagtaacaaaaaaggaagttttttgttgagattgtgattgcaatcacattgattcatatattaatttggttaaaatgtgcttattagtgacatcaacaatttctatccagaattatacaatgtatttccatttatttaattcttggcttgtatccttcaataaaatgtatagttttcatcattggttctgtacctctgttgttaaatgtattttctttgtgtatattttttaagctttctatcactatcaagaatagtttctatcattgttttttccagttttaaccagttttactctaagatcagattatgctgtagttttctagtggacttttctccctcgagcccattgactgactttttcatgacagtgccctgcaaacactaagctcggtgaagactgttgaatgttgaatgcctgaacttggcacattggcaaattatacttaaagaatgccataacaaaaattcaaacacacaaaaaaagaaaagaactaatacttactaagcttttcctatgtactaagtcagaaataatttatgttatcttgtttcttctctgggccaagccagaaataatttatagttttaatcattttaaaagtataaatctcccttcagactatactagaaaagaaaaaaagtacaaatcagatttggaagtagatactaaatagccaattgattagtttgatttttttttcttttttctttttttctttttttttttggagatggagtcttgctctgtcacccaggctggagtgcagtggtgtgatcttggctcactgcaagctctgcctctcgggttcacgccattctcctacctcagcctcccgagtagctgggactacaggtgcccgccaccatgcccagctaattttttctatttttttttagtagagatggggtttcactgtgttagccaggatggcctcgatctcctgacctcgtgatccgcccgccttggcctcccaaagtgctggaattacacgtgtgagccaccacgccccgcatattttttctttcaaccaatatttcagccatagggtgacccaagtatgatatgctatagattatatgtaacaatttttgaaaatcatagatttttttcataccatagaggcagaaaggggcctgtttgcctccttctcagtcatatgaagatttttctggaaaacactcatttgggttatatttgatgaatattaagcttttataggatttttgcagaatcttgtcactgacctttgttaaataattgcattacttgaatatgtacctcagtttcctcatcagtaaaatgaaagggttgggctaaatgtctgagtcaagattttactgtagggtggccaggtgcagtggctcacacctgtaatcctagcactttgggaggctaaggcaggagaatctcttgtgcccaggagtttgagaccaacctgggtaacacagggagaccccacctctacaaaacaaaaaataataataattaattaatttaaattttttttttttttttgagacggagtcttgctttgtcacccaggctggagtgtaatggtgcaatctcggtttgctgcaacctccgcctcccgggttcaagtggttctcctgcctcagcctcctgagtagctgggactacaggtgcgtgccaccacgcctggctaatttttgtatttttaggaaagacggggtttcaccatgttgcccaggctggtctcaaactcctgacctcaaatgatctgcctgcctcagcctcctaaagtgctgggattacagatgtgagccatcacacccagccaaaagaaaagattttactgtaggggaagcagtatgccttagtggcttaagttgaacatagttcaaatccaattccttagaaaagagagttcataaattgaatcaacaacattcaggactttagcataaaatagagtattttgcaccagtagattaaagattgaatagtcatatggaaaaagtaaagccaagtctctgagtctttaaatcaaataaatttcaatggataaaagatttatatgtgacaaggatatttgtttgtaatggcaaaatgattgggaaccacctcaatgttcatctagatgatattccttaaataaagtatggtttatttgtacagtggaatactatgcagctactaaaaaaataggccactgtataagtacaatgaatggaaagatctcaaagatatataattttaagtgagaaaagcaacgggtagaatggggtatataaagtgctaccatttatggctttaaaaaaagaaaagcatgggagaaaatatatatatttgcatgtgcatgccagatctttggaaggatacacaaaaactggcaatagtgattgtttccagaaaaaggcctgatggctgcaagtggatgagaaggagacttcactttcatatgtttatttgtaccttttggattattttgctagatggatgggtgatattctacttaaaatgatacattatatatatccattttctcaccaagtgaagttcataaaacctggttcatagggctatcataagagctggatcagataatgtgagagagagcctagcgctatgcctggtacgaggtaattgtcacacacacacacacacacacacacccttttcccacccctacttgaattatctagacaacctgtgatcaaagacatgctgacacagaatggtattttttgtttctctcttggcattggagggtagtgatagaatttgcaaaagggaaatacttggctctccacaaaaaaagtggtttctaataccttactcttttttttttttttttacttagagattttattattattattattattatactttaagttttagggtacatgtgcacaatgtgcaggttagttacatatgtatacatgtaccatgctggtgtgctgcacccattaactcgtcatttagcattaggtatatctcctaatgctatccttcccccctccccccaccccacaacagtccccagagtgtgatgttccccttcctgtgtccatgtgttctcattgttcaattcccatctatgagtgagaacatgtggtgtttggttttttgtccttgcgatagtttactgagaatgatgattttcaatttcatccatgtccctacaaaggacatgaactcatcatgttttatggcttcatagtattccatggtgtatatgtgccatattttcttaatccagtctatcactattggacatttgggttgattccaagtctttgctattgtgaatagtgccgcaataaacatacgtgtctaacaccttactcttatacctacagaattctcctaccaaaaaccatctcaccaatccctgttaccctcgggattatagcatcagcttcaccatgggccatgtatttgatagcctgtgcactgtggaccagaggccagaaagttataaccccaatgatgtcatcacttttgaaggaactggggacccatctctgtgtaaggagaaggtggcttccatatttgacttcaaagcttgccatgatcaagaaacctgttcttttgatggggtttatcagccaaagattaaagggccatttgtggtaagagcaaaaccttctgaaagattcctttccccattgaatattcatttctcacttttctgtttctcctctgctgacttgttagccaccttcttattcctcacccataaacctttctattataccccattctgagaactaattttcttctgtattacttatttccaggcttttgcaggattctactacacagccagtgctttaaatctttcaggtagcttttccctggacaccttcaactccagcacctggaatttctgctcacagaattggagtcaggtcagtatttaaagagaagggatcaatgtcagtacaaaaaaatatggtagaatctattctatgtgtgtgtattctgaatttagcctttatgctcttctatttccatcacatctgtaaaataaaaggaataagggaatctactcccacacctgtggtgtgaattaatgttataactacatgcacaatggttagaacaatatttggcatataataagcactcaatgagtttaaagattagtatattgtgatattatatagggatattttcataattatattgtgtgattatatgattgtattataaagtattttctattatgaaattatgggtgataagattctttaaaacatgacttttaacccaaggtgttcattttaaaacatacctgcctgccctgcctctcagatgttttaaacctttcagctcccactgctgctccccaaatttgatgaggtatatgcccgctcttactgcttctcagccaactacatctaccacttgtttgtgaacggttacaaattcacagaggagacttggccccaaatacactttgaaaaagaagtaagttaagcacaaatcattttctcttcttcttcccaacagagaggtttgtatgtgtgtgtggaacaaatgtagaaggtaaaagggtattaatgagttaaactcactgggtggaagctgatcagactgatcccttgtgagtttcccagaagaggtcatggagaatttagaagagttgctcatgggtatacattctcctggaaaagactggaagccaagggccaatggactaggcggtcctggagggcagagacctgtcttggtatcttcatattcccagcactctgcacaaggaatagagcctagaaggtacttagtaaatgttggttgaattcataaataaatatgttaaggatatgagacttttcatcctgaaaagaagctttaaatgtaacagttttttaaagaggatagtaactaattcttctccattttattcagatatcagagtaagatacaggccttagggcctgatggatttgcattagcattaaataaatattttctctttgaatgaacctgaagtcattatatttactgacaaagatttgggggatggggaagatattcttagctcagggtttaatatatttaaaaatatgtatatttatagatatctataaatacatacatatatatatatgatggtcaagtgaccagaatggtccaaagctggaatcacagctgtcacctggtgacaggtgaaaggacctccataccttgtttttaggcagggctaagccttgtgaatatgttcagccagcactatgttccccaggttccagagaattttctcatttcaggaatagctgatatgaagcctgaaggatgtctggagtcagcctgttcaataccagcttcagcaataattagattaaaccaatcaatatcctgcattaggcctctgactatctacttttacataaataaaattgagtcatctacaaaaaaataaggatgtctggagacataaggactgttggtagcatgtactctctaagctttgcttctaataaatctaattaccagtaaagtatattataagaatggagaatgactttccatttgaatgccagtttgagttgacataatattctaagttaaaagttccctttttttaattataaagaattttgtgtccagccaaattagtatttaaatgtgaagatgtaggctgggcacggtggctcacacctgtaatcccagcgctttgggaggccgaggcaggcggatcacctgaggtcaggagtttgagaccagcctgaccaacatggagaaaccctgtctctactaaaaatacgaaattagctgggcatgttggtgcatgcctgtaatcccagctactcagaggctgaggcaggagaatcacttgcacctgggaggtgaaggttgccgtgagccgagatcacgccattgcactccagcctgggcaacaacagcaaaactccatctcaaaaaataaaaataaaaataaataaataaaaatgtgaaggtgtaaaaagacttgagaagatttgctgcacagaagacttacaatgaaaatatttttggtggaagtaataaaataagaagagaaataaatccaggagatgttacaaaaacactggaagtaagaataaatgatgttgtggcttaaaatttacattaaaaaagccgggtgctgtggctcatgcctgtaattccagcactttgggaggccgaggcaggtgaatcatttgaggtcaggagttcgagaccagcctggccaacatggcaaaaccatgtctctactaaacatacaaaaaattagctgggtatggtggcatgtgcctgtactcccagccactcaggaggctgaggcaggagaattgcttgaaactgggaggtggaggttgcagtgagccgagatctcaccatttcactttagcctgggcgaaagagcaagactctgtctcaaaaaaaaaaaaaaaattatattaaaaaaaacagaaaacgaacactaaagaaaagtatttaaaaaaaactccattcatatgactcaagtatagaaaatatccacatgataagggtgtggtaaggagttataagatacagggacataagagtaacctaaaattctcttcttgtcaaaggaaacacagagatatctttttctttttcttttctttttttttttttttttttgagacggagtctcgctctgtcgcctaggctggagtgcaatggtgtgatcttggctcactgcagcctccgcctcctgggctcaaacaattctcctgcctcagcctcctgagtagctgggattacaggcacccaccatcatgcctggctaatttttgtatttttgtagagacagggtttcaccatgttggccaggctggtcttgaactcctgacctcaggtgatcccgcctcggcctcccaaagtgctgggattataggcgtgagccaccatgactggccacagatatcatttttaaggcaggaaagaagaaaaaatatatatagaaaaatagcactaattgaaaatttaaaagtaagatattagaaagaagtgtaaatatattaataatcacaataattataaatggactaaacctaccagttaaaagagagatgtcaaattgaatttttagaaatcaagcaggtgccatttataagagaaacatggttcaagcataaagacatggaaagatagaaagataattttgttaaattatcaaacactacccaaaagaaagctggtataactatttagtatctggcaaagcagtctttaagaccaagagcctcattctagacacagagggttacaacataatgataaaatgttcaattcactatgaagattgcaaaggtgaaacatttatacacctaataaaacaccctaaaaacatgtaaagcaaaaatagatagaactaccagaataaattgacagtcagcttcccatttgggctgattttctattcttaggaactggtcctgggatcagtaaaccactcattagcctctttctctagccacaaacactcctgtgctcctggacaacaggaacactttcactgttattaactgtgccgtcttcactcttggctgtgacaagattgtgagaatttgttcttttgactatttcttctgcagcgctggaggtgagatttccccaagcctttgtggctacagtgtggtgtcttaacttgggcaagtcctttgacctctttgggccacaatttcccatgggagctttgtgaggttgatagcagtatgactccggtatgtgattgcagccttgagccttgccctgagcgctgagccatctcctctactccacaggtggggaatagcagcatagcctggtctcttggctacatgctcagcctgaccaaccagatcccagctgaaagccctctgatccgtctgcccatagaaccacctgtctttgtgggcaccctcgctttcttcacagcggcagccttgctgtgtctggcatttcttgcatacctgtgttcagcaaccagaagaaagaggcactccgagcatgcctttgaccatgcagtggattctgactgagccttcaaagcagctcctggagtccaatggctgcttagagtcagcctgggtggcaccaggcaatgcaggtgaagtggctgccttcaggaaatacaactaactaaaatcaaacacctaggtcacgtgcctctcaaatactgatttctgccacagcacctcttgaggcatcccttggctattctgtgcatattgttcttcagagacctcactacccacatgctgatctattggggaacagagaagagacaggccacgaaggtcaggctctttatattaagttccccagaggaagagtaagttgagaaggtatcagtttaatgttgaagaattgacctcagggctcagtttccatttccctccctcagtattcttcctggcaagatacccattaagcatttcgccaatcagaatctcattttatagtttttcccattggtctttaactaagactttcttgtagcaatctcgtaagcagtgaaccccctcagatcagtagaatatagtatctgggggagaagacttacttccttcagggcagcagccacagccaggcttctgtcatacaggtagatcccgaagcacagagacataaaaaaggtctcccagaaaactatagaccattctccaagtggaattcccacttagggctctggtcactagattgcaacctgtgtgtttgtcatcatcctcatctcaccattgtattgctatgccctcccataaaaacacattgatccctagcaagattattgcattccagattttactgcctttgctaggcttttgcttagcaaagggctgactttccattgttatcatggtgtatatatttttgtcaccattcccacaagtatacttgatgttgtcatagaacgaacatcctactctatgatttactaaccaattactttcccagatcatagacctctctgcatagtagtcataggtcttgactttggggaaagaaaaggaagctgcaggaatatttatctccaaagtcgaatgagaaagaactccagcaaatccaatggctacaaactaaaaatcagcattatttcatattgctgtttcttagctgaatatggaataaagaactattattttattttgacttgcaaggggtgtgtgtgtgttaacttccatatggtactctttctcctaaggaccctaggtgatatttatgagagaaatttttttccctagcaaattaagaaacccattcattaatatcacctttattccagagagttcaaagtgcttttactttgataaacctttgactgcttgagattattgagtcaagcatttctgtaccttatttgaaattctaagcctctgtgagtccacaacctgacactcaaatcttggttctcatccagaacggctactcctatcccaaactgtacctttgctcccgccatcctctctactatattatagatcctcctcccacccatccaaatcatgtatgtttctcaaggtccagttccttcatataagtcttccacaaagctttccttgcacacacatactatgctctatctcctggaccactttttcaaaaccagccacgtaagtcctcatattgttatttatcttggcatatgtgtacagcttatttctaaaagacagagtaggctacttaagggcaaagcctattgtacatcactcctcatttattcaacagacatctaaaaacacctattatggctgataccttttacgtgtgattttggatttggacatatgctatgaacatagtatttattcatatttgttgattgaggttgtttccatgagtgactaagaaatgggcaataaactatagagatagcagggaaaaaacagcatccaaatcaccaagagtttgcaagaaaaaaaatttgtatgtgcaagaaagagagccaaagctccatgaaggcaaatcctagtcaacatttctaactcatttgggaagttagaataaactgaggtacttcaggttttctgacacacaccgaagaatttttgactgggtgcagtagctcacacctgtaatctcagccttttgggagtagctgaggcaggagggattccttgagcccagaagttcgagagcagcctgggaaacgtggcaaaacctcttctctccaaaaaatacaaaaattagccagaagttgtgggcacacctggagtcccagctacttgggaggttgaggtaagaggattgcttgagcctgggaggtggaggttgcagtgagccgagatcatgccgctgcactccagcctgggtaacagagcaaaactatctctctctctctctctctctctctctctctcacacacacacacacacacacacacacacaagaatttttatagatagaccattgtgaaatctgcagttcaagtggcatatctagcactgttactgtggtgaacagaatactccttccccctctggtgttactccaattatgtggttacattgtcacatggcaaaaggattttgcagatgtaattacaaatcagttgaccttaaaatggagagcttatccaggtaggtctaacctcaccacatgagctctttaaaggcagagcattttctccagaagacgaagtcagagattcaaagcatgagaagaattccacatgcagttgccggcttggggatggagggcgccgtgtgcaaaggccctaagtgcagcctctagaaactaacagcaatccctggcggcatcagcaaaaaaccaggaacctcagccctacagctgcaaggagctggattctgccaacaacctgaatgaacttggaagcatattttcccccagagctttcagataagagtccaggtcagatcatatcttgatttcagcctactgagaccctaagtggagaacccagttgagcccactctgacttctgacctacaaaactataaagtaacaaaaagatgacgtttaaagccactaaatttgtggcaatttgttacacagtcacagtaaactaatacaactatagaaccccaaaccccaaagctccaaccaaagcaagtcttttgatttgaaatatgtgaagataaaagtgatgagtagcacaaatagtgtctattcctaatcacagctatgtaaaaaaagcatgggttcagaggtaaaagtacctgacagcattactcagtcactgagtgatttggggaatagggatcggggcttgagctttgggcctggttgagtctaaaacccattgcataactttgcctttcacacagaaaggcagtatcatatagtagttaggaatttggctttatatttccgtagtctaacatacccattcacatacagacacctgatttataacagaggtgtcacatcagagcagtgggaaaatgcaggacaattggatatcttaatggagaaaaaatgaatttgaccctttcctcactccacttgcaagaaatgtttccaggtagcttaaagacctaagtgtgaaaaacctataaaggtttagaagaaaatgtaggagaatatttttaggatactgggtaagggaagggtttcttaaacactacacaaaaagcattaaccataagaaagtatttaatacattaaaatgtaaaacttctgttcctcaaaaaacatcattaaaagagtgaaaagacaagccacagagtggaagaaggtatttacaacatatataactgataaaggactactttccaaattatatgaacaacacttacaaatcagtaagaaaaaggaagatgattcaatttttctaaacaggcaatagtcttgagaagacacttttcaaaaggagacaactaagtgtctaataaacataggaaaagatgctcaatctcattattgggataatgcaaattaaaactacagagaaatagtacaatatgctcattcgtttggcaaaacttagaagtctgacaataccaaaattagtgaggatgtggaactggaactctcctatactgctgtaggaatgtaaattaatgcaaccactctggaaaatggaggtattgtctaataaagttgaagaaattccagtccaaagtatataccttagcgatatatagtcttagatataccaggatacatgcctaagaatgttttaagcagcaaccaagatgcctatcctacggaataaatgaataaataaatagcgatacagccatactagaaaatactgtacatcaatgaaaacaaaagaactacataatcaaaaggttttttgtttgtttttgttttgttttatttttgttttgagatggagtctcgctctgtcacccatgctggagtgcagtggctcaatcctggctcgctgcaacctccacgtcctgggttcaagcgattctcctgcctcagcctcctgggattacaggcatctgccaccacgcccagctaatttttgtatttttagtagagacagggtttcaccatgttggccaggctggtctcaaactcctgacctcgtgatccccctgcctcggcctcccaaagtgctgggattacaggcgtgagccattgcacctggcctaatacaaaatttaaaaacaggcaaaactaaacacagaaggttaaacgctaaagaaaagcaaggaaattattactttgaaatttgggaggagatggaggctgtatctggaaaaggataaatgggtgtcttaggctgcttgaactgccataataaaatactataaattgagtggcttaaacaacagaaattaatcttctcacagttttggagcctgggaattccaacatcaaggcatcagctgactaattcctggtgagggctcaattcctggcttgcagatggtggcctttatgctgtgtccacacggcctttcctctgagctctcagggagagagagtgagagagagagagagggcactctgggatctcttctgacaagggcattaatcccaccatgagggccactccttcataaccttgtctaaccctagttatctaccctcccaaaggctccatctccaaatcctacactgggggttagggcttcaacatataaatttgggggatcacaaatattcagttcataacaacagggcttctggggtgacagtgttattctacaactaggtagtggttacagatgttccctttttcaaccatttatacatcatctgtatgtcctatactacaatataaagtgacagatctgggttaactcaagaattttctccttattacctctatggttttcatcatatctttcagtctccttgagtcttgacttcctccatatataaaacaggcataatacctacctcatgggatagttaagagaaaatacagcacttagccagtgcctgacatggatgtagctaataaatacaagttttaaaacatatttatttcacccatttacttattcactcatgatactttcaccaaaagtctactgtgcgacaagccctgagctaaatgactaagggtgtaatagaaatgagacaactgtcttttctctcgaaacatgagacttgaatgccctctgttggagctatggaaaaaattcttcccagggtgagcctcccaccctttttttaaacctctctaaaggtattagaaaaaaaaatcattagttcaaaaatagttttaatagtataaaataaggagataattggaaatctgaacactgaacattatcaaggaattcctgttaatttttgtttaggtaaaataatggaaccggcctggcgccatgactcatgcctgtaatcccagtactttgaaaggctgaggcagatggattacttgaggtcaggagttcgagaccagcctggccaacttggtgaaaccccgtctctaccaaaaaatacaaaaattagccaggtgtggtggtgcacacctgtaatcccagcttctcgggaggctgagccaagacaatcacttgaacctaggtggtggaagttgtagtgagccgagatcacgccactgcactccagcctgagcagaagagcaagactctgtctcaaaataagtaaataactaaatgaaataatggtatcttggatttttttttcaagaacccttgctgtttagatcaatggtcctcaacctttttggcaccagaaaccggtttcaagggagacaatgtttccacggacagtgtggggctgggtggggatgcacagatggtttcaggatgaaactgttccacctcagatcatcaggcattagattctcataaggagcaaacctagatccctcacacacgcagttcacaatagggttcgcattgttgctgatctgacaggaggcggagctcagatggtaatgctggtttgcccgctgctcaacacctgctgcgcagcccggttcctaaacaggccacggaccagtactggtctactgcctggctgagggttggggacctctggtttagatacttgctgaactgtttccagatgaaatgatacgtctggcgtatcagtcaaagttcaaccagagaaatagagccagtattaagagatctattgcaaggaattggcttgtgagactatggggctagctaggcaagtcctaaatccacagggcaggccatcaggaagagcaggctggaaccctcaggcatgaactaaagctacagtccacagatagaatttcttccttctcagagaagtcccagttctgctcttatggattttcaactgatttaatcaggctcacccagattatctaggataagtccccttaaaaatctactaattatgggcagtaatcacacccacaaaatactttcacagctacacctagattaacaaataactgggtgctatagtctagccaagttgacacataaaattgaccaccacatctgtgaattgattcaaaattacaggggagggagaatgtaggggtagaactggcccatactttgatggtccttgaggttggggtgatgagacataggagtttattatagtattctatctgctttgtgtatgtttacaattttctaaataaaagttaaaatacatattttgaggccaggcatggaggctcacgcctataatcccagcactttgggaggctgaggcgggcagatcacctgaggtcaggagttcgagaccagcctgaccaacctggagaaaccctgtctctactaaaaatacaaaattagctgggcatcgtggtgcatgcctgtaatcccagctacttgggaggttgaggcaggagaactgcttgaacccggaaggcggaggttgtggtgagctgagatcatgccattgcactccagcctgggcaacaagaatgaaactgtctcaaaaaaaaaaaaaaaaaaaaaaaaaaaaaaatatatatatatatatatatatatataaacacgcagaatctcactgctgtatatttgatatttttctttctgaatctttttctctacatatttgtacatagttaagatcatgctggaattacaattttatatttccttcgttcacagcattataccattagcattttcagatctcattaaaaattattcccaaatatcaaacaaaatgattaagaactcaggctttcacatcacaaaaacctggttcacacatcctagttctgctgttcattgttgtgtgatctttgtctaaaaatcttaagttttctatgcctcagtttcctttaatacagccattcaattcaactgcttgttcatttgttcattcaactaatattgattgaattcatcctctgagtaagatcctgtgtaggtggcataactccaccaattaacaatgtagacaaagtccttgccttcagggagccaacgttctagtgggggagacagacactaaccaactaaatacacactgtacaggggattataagtgatctggagaaatataaagaaaagtaaggggaaaggaaagtgccaggagcatgagatggggacgccattaggtcagaaaagtcttttcagataaggtgacgtctgaacgaacacttggaaaatgtgaaggagtcggccatttgaatatctggaggaagagcattctaagcaaaagagaccacaaatacaaaggccattgtgattggagcagaataaatgactggaagatggaggagatagggtaagggagttaagacggagtagatggtgcaagggggccccatttagagttctgaacaaaggaggggtatctggcttctgtttctagttacagtgataaaaaacaaaggagacaagagcagaaacaggaaaaccagttggtgggtgattttaataatccagatgagaaatgctgatggcttggatcaggttggtagcagtagaggctgtgagcaatggtcagaccccggatatatgtgaaagtagagcccacagtgtttgctgatgaatgtacatggagtgagagagaaaaagaggggttaaaagttattccaatatttttgcctgagtgactgaaaggatagagttgctattaaatgacatgtgaatatagcagggagagagggtttagtaagaggaaggttaagatccagactattttcttaaaaaaacaaaaactgtttataccagcacatatccataagcatggagagaaaagaagaaaagaaaacaacaaaaacattttggcatggtggaccaggggtaactgacttagcagacccaagaaagcacaatcctaaaacaatgagaaaataaaaaatcaaccaatgtaaacagcagtgttctcaaaaagctcaggaatctgtggcatcaagtacagctgcaagttgggttggcaagcacaaaataaagataattaaagctgtttaagaatagtgattctggccaggtgcagtggctcatgcctgtaatcccagcactttgggaggctgaggcgggtggatcatgaggtcaggagttcaagaccagcctggccaacatggtgaaactctgtctctactaaaaatacaaaaattagccaggtgtggtagagcacctgtcatcccagatactaaggagactgaggcagctgaggcaggagaatcgcttgaacgcgggaggcagaggttgcagtgaaccgagattgcaccactgcactccagcctgggcgacagagcaagactccttctcgaaaagaaaaaaaaaaaaagaatagtggttcctagataccttctactctttgctgatgagtgactgcctcttcctaacccaagcacaggaactggaaggcacaaggcacagttacaggtggaggtgtcataccaaaacaacaagattaaggaaaccaaggcatattcagtgtttagactccaagcctctaaccccatcaactcccaggttctaggttaactctaccctctagtcaggactttggaagattcttttgtgaggaatccaagaagtccaggagaaaggacacaaatgtgctggcatttgcagtttgctagtcagattatcctacagtgaagcttgaatcaataactcaaaacttccaatcagctttttatcccctcaccttaaacagaaaacaaacgaggtgccaggagtggtggctcgctcatgcctgtaatcccagcattttgggaggccaaggcgggtggatcacctgagctcagcagttcgagaccagcctgaccaacatggtgaaatttcatctctactaaaaatacaataattagctgggcaggatggcaggtgcctataatcccaacttctcggaaggctgaggcaggagaatcgcttgaatccaggaggcggaggttgcagtgagccgagattgtgccactgcactcgagcctgggcaacagagggagactccatctcaaaaaaaaaagaaaagaaaagaaaaagaaaaagaaagaaaagaaaagaaaagaaaagaaagaaagaaaacaaggcaagtatttaaggacagcccccactgttgttctagtcaggcatcaggaagatatgcacttagatatcagtttgtgttttatcagccatttttacccagaagtctgtctctcttgttattgttacctccctctatcttctgtcatctgctttcttcttttctaaataaaagtagagttccaagaagcccatgtttttattttattttattttatttatttatttattcatttattttagagatggggtctatgttgctgaggctggacttgaacccctgggctcatgcaatccttccttctcagcctcccaagtagctgggactacatgtacacaccactatgtctggcaggttcctgcttgtgtccctttgctcttatctgcttaaaagtcacctctgaatcatcactagaacttgacttctcacagatgaaaaggcggtgtgatgaatacaagtaaagattgggatgatgcacttgaaagatggaggaaggggcaagtcaaggaacataggtggccatgagaagctgaaaaagcaaggaaacaaattatcccctcagagtctccaaaaggaacctctaaaagccaaaacgttgactttagcccagtaaaactgaattcagacttctgacctttagaactgtaagagaataaaacttgttttaagccattaaaacaaaacaaaacaaaatttgacctctcacaacagagaggaagtcttactgcctttctgtagatttcagaaccatggtcagggatccaaatacactctatgagggtgacatgggctccatcacacactccagaaaggagtgtaaattaatctaacgttccgaaaaagtagctataatatgctgcaagattttaaaagtgcacattcctcaatccaacaaccgtatttctaaaaattaattctaaggaaaccttttttaaaaatacggacattgttattacagatacatattgaaatatttatggatacactgatataatgtctgggatctgcttcacattaatcctgtttggtgagcatattcacattttctcataggggagccactaggcacatatggctattgagctagtccagttgagatatgcaatgaatgtaaagtacacactagattttgaagacttagtaccaaaaaaattaaaatatgtcattaataacttggaaactggttatatattaaaacaatattttggatacattgagtaaaataaaatgtattattaaaattaatttcacaggccaggcacaatggctcacacttataatctcagcactttgggaggctgaggtgagatgggaggatcacttaaggccaggagttccagaccagcttgggcaacacagggagactctgtctgtacaaaaactttaaaaattagcaggcctgttggcacatgcctatagtcctagctactcatgaggctgaggctggaagatcggttgagtccaggaatttgatgcttcaacaaactatgattgcaccactacactccagcctgggcaatagagtaagaccctgtcttaaataaataaataaataaatttcacttctttctttcatatttttcaaatgtagctactagaacattttaggttacattaagttaggttttaaattacaaacatggttttcctttgtagtttacattatatttttattagacagcactggtatagaatccatatactatagataaaacaagatggcccattaaacatgaacatctttggatacttgaccaaaaatggctattgttgaaactaaataatgggtatgcaggagtttattataccattttctttacttttgtacatgattgaaaattccataatgagtctgggcacggtaactcacacctgtaataccagtactttggaaggccaagacaggagaattgcttgagctcaggagtttgagaccagcctaggcaacataaagaaaccctacctctacaaaaaaaaaaaaaaaaaaaaaaaaaaaattaattagttgggtgtgggtcacgtgcctgtagtcccagcttaaccagaaggctgaggaaggagaacagattgagcctgggaagtcaaggctgcagtaagctatgatcgtgccactgtgctccagcctgggtaacagatcaaaatcctgtctcaaaaaaatatatattacataatgaaagtttaaaaatatgtgactaaagctgctttcagaaaaataccaatccctatttatataatagtaaaaagtgaaaaagtaagcccgatcttcaatagcagtagaggaatggcgaggtgaattatgttcatctatatgctatgctaaaagagtatgatgcagccattaaataataaaataaaaaataacatctaacatttgaatgcttactatattccagacctgtgctaagcaaattatatgcattacatcacttaatttttataacagctctctgagttggataaaatttttattctccaacctcttcccttgactccaaatttatatattcattagcctgccaaaacccattagctagattatatggataaagagcctaacaaactaaaagaaaaaatgaattggcagaaacagaaactatgcaaggaaaaaaatattttaaacaaaaaaaagaaactcattaatattataagaaaaataagggacactgcatcaatgaaatagaaacaatttttttctttttctttttttttttttttaagacaggatcttgctatgttgctcatgctggccttgaaaacctgggcccaagcctcccacttcagcctcccaagtagctggaactacaggcacaccccaccacatctagctcagaaacaattttttttaaaggaaagatgagatattcagaacaaagaaacagttcttggaaatttaaaacatgatagcagacattaagaactcgctagaagggttgaaagatagcattgaggcaaaccctcagaaaggaaagaaaaaacacaaagaaatgggaaaaagagtaagaagacaaaattctaagactagcccaccaaaacccccatctgaataacacaagtttcaaaaagaagaatcacccatgaaatacatggaaaattttaccctgaccagaaggatatggacatgattgaaagggcccagcccaataaataaaaattactttacaccaatgtacaatgctataaaagttcagaacattaaaaagaaaaagaataccccttataaactttcagagagggagaaaaaaaaaacaggccacatacaaatgatcaagatgagaatggatttagttttctcaacaataactctggaagcaagaagccaatggagtaatgccttcaaaattctgagggaaaatcatgtttgagctagagttctgtatccagccaaaaatgatcaattaggtatgagaatagaagagagacattttctgacagcttccttttacagggagctaactggaaggtgtgttccaccaaaagaagagactaaaccaaggaaacaaaaggcatcgactccagaaaaaaaggagatccaatatgggagaaaatgggaaggaaatctccaggatggtgatgaaggtgtagaggggaccagccagaatgaagtgactcagtagcctctaaaggaaatagccaatagacacatgaaaaaatgctcatcatcactggccatcagacaaatgcaaatcaaaaccacaatgagatactatttcacaccagttacaatggcgatcattaaaaagtcaggaaacaacaggtgctggagaggatgtggagaaataggaacacttttacactgttggtgggactgcaaactagttcaaccattgtggaagacagtgtggcaattcctcaaggatctagaactagaaataccatttaacccagccatcccattactgggtatatacccaaaggattataaatcatgctgctataaaaacacatgcacacgtatgtttattgtggcactattcacaatagccaaagacttggaaccaacccaaatgtccatcaatgatggactggattaagaaaatgtggcacatatacactatggaatactatgcagccataaaaaggatgagttcatgtcctttgtagggatatggatgaagctggaaaccatcattctcagcaaactatcgcaaggacagaaaaccagacaccgcgtgttctcactcataggtgggaattgaacaatgagaacacttggacacaggaaggggaacatcacacaccggggcctgttgtggggtggggggagtggggagggatagcattaggagatatacctaatgtaaatgacgagttaatgggtgtagcacaccaacatggcacatgtatacatatgtaataaacctacacgttgtgcacatgtaccctagaacttaaagtataattaaaaaaaaaagatgatgatgaagttgatagaactttacatctgggccatgcgtggtggctcatatctgtaatcccagcacttggggaggcaacctagtgagacccccgctctaccaaaaaaaaaaaaaaaaatggccaggtgtggtgatgtgtgcctgtagtcccagctccttggaaggctgaggcaggagggttacttggagcccaggaggtcgaggctgtagtgatccatgattgcaccactgcactccagcctggaggacagagtgagaacccatctcaaaaaaaaaaaaattgtgttacactcatgcaatggaatactactgagcaataaaaaggattgaactcctaatacctagaataacatggatgactctcacagacataatgttgagctgaaaaaatcagacccaaaagaatacatactgtatgatacaatttatatgaaggccaagaataaacaagaggaatctatggtgatatagaggcacaatagtggtagactccaggaaatgaagttaagaagaaagagggaacttaattcggccacagaaatgttctgtattttggtctggatggtggttacgaagtggttcatgcctgtaatcttagcactttgggaggcttaggcaggcagattgcttgagcccaggaatttgaaaccagcctaggcaacatggcaagacctcgtctctacaaaaaaatacccccaaaaaaattagccaggcatggtggctgtacctgtagtcccagctacttgtgaggctgaggtgggaggataccttgagcctgggaggtggaggttgcagtgagctgagatcatgccactgcactccagcctggtgacagagtgagcctctgtctcaaaaaaaaataaaaaataaaaaatagaagggtaacctgttgacaagaacttccagcccaggattttatacaagaaggctgttttctgtgtaagcaaagcagtttattttaacgttttatggtttctcctaggaatatgccattgattaaattatgaaaaagctttaggcggagcacggtggctcacgcctgtaatcccagcactttgggaggtcaagacgggcagatcacctgaggtcaggagctcaagatcagcctggccaacatggcaaaacccagactctactaaaaatccaaaaattagctggggtggtggtggcttcctgtaatcccagttacttgggaggctgaggcaggggcatcgcttgaacctgggagggggaggttgcagtgaactgagatcaagccactgtactccagcctgggcaacagagtgagactccatcagaaaaaaagaaaagaagagaaaaagaaaaaaaaagatacttggctgggtgcagtggctcatgcctgtaatcccagcactttgggaggctgaggtgggcagatcacttgaggtcaggagtttgagaccagcctagccaacatggtgaaaccccgactctactaaaaatgcaaaaactacccaagcatggtggtgcacgcctgtaatcccagcaggagaatcgcttgaacccaggaggcagaggttgcagcgagccaagactgtgccactgcactccagcctgggtgacagagtgagactccatctcaaaaaatatgtatgcatatgaaaaagttttagggccgggcatggtggctcatgtctctaatcccagcactttgggaggccgaggcaggcggatcacaaggtcaggagttcgagaccagcctggccaacgtactgaaaccctgtctcaactaaaaaatacaaaaaaaaaaaaaaaaattagccaggcatggtggcaggcccccgtaatagcagctactcgggaggctgaggcaggaaaatcgcaagaaaagaaaggaagaaagaaagaaagaaaggaaaggaaaggaaaggaaggaaggaaggaaggaaggaaggaaggaaggaaggaaagaaagaaagagaaagaaagaaaaggaaagaaaggaaaagaaagaaagaaagaaagaacaaacaaagaaacaaagaaagaaacagaaagagagaaaaaggtttagacccaatttatactttccatgtatacctcctcataggctaatttgttcctcagtttggcggttttttgattgtttctaaaatgctgtttctaaaagaacacttatctgccctaaaatgacatttttggggttttgaacaaaatccccagctggtgttttgtgacattgcaggaacaagcctatgttttcctgtatagatttcagtgactacttatgactatcatttccatcctatttcaactgtgccatttccatataaagtcttaagatttaaaatttcacatcctatagcttgctgctgcccacataacatgtgtaagtagtaagtacccatttcctgatatttacttttgcttttttccatagtaatagttctagaatatctgatttttagcaaggctcatagccaccagaagtggagactcaatttcccagcattgcttgtaggtttggtaatgaggctgagttctggccaacggaaaggaagcagaagtgtcctgatatggcaaccaagactcttcctgagagaacagtggacacccatcttttgcccttttcctttatcctgctgcaaagtgtaagggcaggatctgtaggcctgaagtaatgagaataagagccacctcatggatgttagggatgtagggagagtaagctgggtccctgagctgagggaccaggccagctcaggacccccacaaaagaggaaaataaatgtttaagccacagttattgagagactctataactcattgctaaaattgatgcacactaactcccctccagatgcctcttctgggtctgatgccaccactaatgggccaggtgaccagaattgaatgtaatcaacttcttcttcagatgtgaccctatgatttcgctcaagtttcctgggctctccatgtcctgctcatgctgaagctccaacctgtggatgtatcctcaaactcattctttcaaaatggtcagtagagatttttattttcaaatgcccaaggggggttgttgtgcacaaatggactatcaacagttactagccattaaaataatatttaatttttaaagtcttatgtttaaaaacctagattttcttaaaccttttatttcaacttgtaaagttattattctgttttataggtagtaatttttatgtaaattagaaacaataactttagcttgctctatgatgaatgttcaaataagtcaagtctaagagattaaatttccagaaacattagcaccacttaaaatcatgattaattaaatcccctgaaaactttaagtctacttcattaatgtcatattggtggcagcagtgacccatctagagtggccactgccaagacatcggctgcagcagggaggcacggctggggttgtacactccatggaacaggcagaagccctgccctccccaggtgccactgcagctgcccaggcccggctgcaaacccaggcatctctgtgctcttgggggcccaggaaggcccccctgcgaagtgtctgctcccactgcctggcctctccctgctcccagtgcccgctccaatcatgaagcaaggttggggccgaacccgggcactgtcacagcccagccaggtgggcacacactgaggttggcactgacacgccagacccctgccaccttggccccttccggactttgggcactgacacatacaggagggaagccaagcaggggctgaggacagttgaaacatgatgaatgtgttagatgtttttaaacattagagatactttaataaaaaatactcagagattggctacatttaacaacaaaatgtattattatgggtttgatttactaaatgatggctctatgttttccttgtgttgcagactctctcacccaactttagtagcatagcctggatcacaggtgagccgagatgaatgggtcaaaggtgtaggatagcaatataattacccacacgtcagatacagatgtttaagtccaggacacaggagctggctccacatacatcatggatgattctaccttagccacaacttaaaacacagaatctccatttgctatttcaacaagctgctccaaacctttcagacaggatttagtttcacaattaataaactacttaacccatttattcaacacatattactgagcgcaagcaattaatgaggcaatgttcaaggcacttgggttacaggaaagaacaagacaacgttttctgctttctcagagattaaattttagtaggaacagacggagggaagacaacaaaataatgatgtaataaagcaataaattattttctgtcagaactgaaagaggatagccaggatgggcctcactgagaaggtgacatttgagcagacttgaagaagatgcaggagccagcaggcaagatatgggagcccttgagggaagagtgtcctaggagaggggacagtcagtgtgtgggctccgggcagcaggttgcttgccatactgaagaacagcaaggaggccagagtgctggaagaaaatttgcaagggcaagagtgataggagatgaggaaagagaaaggataggggatcagaccgtgaaaggccttgcaggacacttagcagggaggtgagtgtcatgatgatctgacttatgttttaaaaggatctctgactgctgtgtggacgacagattgtagtgtaaaggtcgaaggagggagaccatgtaggaagctgtattaagtatccattgctgtattaacaaatacctcaaaactttgtgacctcaacagcatttattatctcactgcctctgtaggtcaggaatctgggcacaatttcgctgagtcctctggttcagggtccttcacaggcagcaatcaagttgtcagccagggctacagtcatctcaaggatccactgcagaaagatccacttccagcttcacttgggcaactgtcagcaggattcagtttttttcaggatattgtatcctgggcctcagctcttgtctgttcagggggcttctcattttcttgccatgtggggctctccaccggagagctcacaacagggcagcttgcttcatcacagcaagcaaacagaaaagagagggaggcagagaaagagaaagaaaaacagagagacaaacagaggtgtcacagtcttttatactctaatctcagaagtacatcccacaacttttgtcatagtctatgccttagaagaaagtcactaagtccagctgtttctgaaagggaagggattatgcaaaggtgtgaataccagaaggcagaaatcactgggggccattttagaagtgtccaccacagaggctactgcagttatccaaacaagagatagtggtggcttgcacaaggtttattataacagaggaggagagtagtcaggttcttaataaaattttaaaggtagagccaacaagattttttgtctgactggatatggggtgtgaaagtgaaacatcagctgggcaaggtgtctcacacctgtaatcctatcactttgggaggccaaggtggaggatcacttgaggtcaggagttcaaaaccagcctggccaacacagtgaaaccccatctctactaaaaatacaaaaaaattagccaggtgaggtggcgggcgcctgtaatcccagctactcgggaggctgaggcaggagaatcacttgaacccaggaggcagaggttgcagtgagccaagatcgcaccattgcactccagcctgggtgatggagagagactacgtctcaaaaaaacaaacaaacaaacaaacaaaaaaacaaacaaaaaaaaaagcgaaggattgagggtgacttcagggtatctgctctgaacaactggaaggatggagttgccattgacacagatggagaaaactaaacagtaaggtttagtggattaatagggaggggttgctgaagatcaggagctctatgttggtatgttaagtttgagatcaccaacagatgaatggataaagaaaatgtggtacttatacacaatagactgctattcagccatcaaaagaatgagattctgtcatttgcaatagcatggatggaactggagatcatcacgttaagtgaaaataagccaggtacagaaagacaaacatcacatgttctcacttacttgtgagatctaaaagtcaaaacaattgaactcatagggatagagaatagaagatggttaccagaggctgggaagggtagtgagtggtgtggtggggggaggtggggatggtgaacgcatacacaagaaatttagaaagaatgactaagactagtatttgatagcacaacaatgggactatagtcaataatttaattgtacacttaaaaatacctaaaagaggccgggcgcggtggctcatgcctgtaatcccagcactttgggaggctgaggtgggcggatcacgaggtcaggagatcgagaccatcctggctaacacagtgaaaacccatctctactaaaaatacaaaaaattagctgggcatggttgcaagcgcctgtagtcccagctactcgggaggctgaggcaggagaatgacttgaacccgggaagcggagcttgcagtgagctgagattgtgccactgcactccagcctgggcaacagagcgagactccgtctcaaaaaacaaacaaacaaacaaaaaacctaagactataattgggttgtttgtaacacaaaggataaatgcttaaggagatggatacccgattttccatgacatgattattacgcattacatgcctgtaccgaaatatctcatgtaccccacaaatatatacacctgctatgtagccatgaaaattaaaaatacaaaaaaattaaaaataaaattaaaaataaaaaaagtttgagatcatgatctgacaactaagtatatcacaagtccttgagctgtccttcaagttctctttaatttttatcataacttctttcaactcaggtttgagtagatgcaattttattcctcgactaggatcgctgctaatttcctcaatctaattggatccacctaacaactttacaccctcaatggattctgcacggttaagagtatggactctgggtctgaaccatgcactgactagccatctgagggggcacaagttatttagcctccctatccgtttcctcacctgcaacgtaaggataataatatcacctctattctagaggttacatcttgggcttttgcaaggattaaacaatttaatatttgtaaggcactcagaatggtgcctagtgtttgttagaagtgctataaggactagctacacaaatgttctatgtgagtgtgtgtgtgtgactggttctcagccacaattctggagtcacttgataaaaatttaaatactggtcttcccaaaactgatgttgtctcttggaaggcttttgatcaactacaggctctcagaaaatatggacaaaggcgcaagaacccctccaaaactggaataaatacttgaagatattagggaatttttgttaattttcaggtgtgataatactattggggttatatttattttaaagaaatcatcgtttagatacatattgaggtatttatggctaaaatttcttgaattggcttttaaaataaaacagaagacagagtagtaaatgagtagaaatgaaataagattggccctgtgtggataatttttgagaaagtgtaatgtgtacatgggagtttattatacatactattctatttttgtatatgtggaaattcttaataatagaaacatttttgatccaggatctatgccaagagaaatttaagccctagtactgcttcccatggtaaatatttggtacaacttgggttctgaatatttattagcaccacagtgacctctgagacagtgtccctgctggtatggagacatacaaaacacaggttttcaggcccaacattgtccttttaacatattactactgcctttaatgaatgttaactcatgtaatcctttaaaaaaaaaaaaagccaagatgtaacacccatccaacttgtctccagctgcaaccttgcctcctactgtctatgatgaggagggcattcttaacccaacagcctgtaccatctttaaaaacatgtcagatcatgtcactgctccatttaaagcatccactggctcctatcttgagagtgaaagcaagtccttccagtggcttccaaggttccacatgccctggctccttcatcttatactatctctccctcaatcaccccacttcagcctcattggtcttcctgctcttccacacgcatgctgagagagaacttgctgttccctctgcctggaatcccagacatccacatgaattgctcactcatctcctgaagttctctattcaagtgtcactttttcctcaaggccttccctcacttccctatttaaaataactaccctttccccctaaagcaaatccaccctagtactctccatcctcctttttatttttctgtggcacttaccaccatatgacacactatttgtttattttctgtatctacccactagaatgacagttccatgagagtagaacttttgcctgttttattcactactatgtcttcaatgccttgaatagtttctggcacacacgaggcatttagtgtttgctaaatgaattaatacatgctcattccttctagatggcaccacgttagcatctcttctccctgaatgccctgtcactcattctgcatccttgttcaccactatgttcactatgctgcattatccagcacctgtccttgtagtcattccttttggggagagttgtttccatggtgacacaggagcttttcacctacttagcaggcctctcagaaagctctttgcaccctggttctatttctagtgttgttaagactccaacacacacagaactttccattcctatcctggaaagcattctcgatcagtatagctagctggtgcttttcagcagttctgcaggcaggtttatttaagcagacctcttttgatagacatttagtatgttctaaggctttgccttttcattcattcactcaaaatatttataaagggcctattccactccaggcactgttttagtcacctagcatacaccagtgattcaccctggtttcccagagttgaattatcataaattactccacctattgtttatgttgttgtgaaaagtgtcaaagatcttgatcttgcttgctgatctctagctcctgactttgcagcccactgatgcgaaatatgtacagttaaaaaacaaaaaacaaaaaacaaaacatggcgcggtgcagaggctcacgtctgtaatcctaacactttgagaggccaagaggatcacttgagtccaggagtctgagaccaccctggacaacataatgaaaccctcatctctacagaaaattcaaaaattagctgggcatggtggcacatgcctgtagttccagctacttgtgagactgaggtgggaggatggctcaagccagcaagtcaaggctgcagtgagctgtgactgcactccagcctgggtgacagcaagactctatctcaaaaaaaaaaaaaaaaagtacagaaaccaacactacctccttgtttgttaaatacaatggacagaccacacacacacacacacacacacacacacacacacaaaagcctatctaggcatttggagtgttggacaaacttgtactactgaggagttgggcactgcatcccaagtgtcctgacccattccagagtctatcagcctctttgggaacaggaagttggaagtgggcaatcactgaattgctaagatgaccttcatttgcttctcactcagatttctgtaataggccaatgttcctcttcattatggacatttttgattccagagtgtgtcattacctgtggtttgtgagcttacctcctgctttgcaaaagatctagaacttccccattgatataatgctcagaataccttcttgctataccatcagcattcctaaggaataagtaaatacaagctcagttgagaagaaaaatctgcatggttattcatcaggcaggaaaaacaaatacaaataaagacagctgcaaagttaacaagagactattgctgccaaggacatgcttaatctttagtgtcataataaccctctttgagtgactactgctttctcactttctcactgagaaactttgttcctaaaatcaaagaccctcagaaatttgctgtttgaaattttatcagtaggaataaaatatcttgcttggaggacctaagtcactttaacacagagatacagcttcaatttacaagcagccagttgcaaagcttcagaaaaggttttcaaaaaaacaggacaatgggtccactctgcagtctaggcctgatgttgaccctttttcacagtcctgctttgttttgaggctattaaaaccctgcttcatttaagttccatctaaactttacacttcctcaaaatcctgtaactttatattttccttcccctggtaaaatgtcccatggtgtctctggtgtgcaatctccctcattaaaaaagatcgatagacctggttttgctgactacaggtttgtccctggtggtcttaggctgactgggcttgaacagtcttgctcagcttcagggttcctaagattgcaaatttcaaaaactgatacaacaaacattttttcactcctaaatacaaatgcacctgtccacgttgccaggtagttatgcacatggctaccatgtcaatttggtcataactagggttaggtcacttctctggaaggttagttattaagaacaagaaagaaagtcagggttctgcacagcttttggtttgattcttgtactgacttatgtttctttttctttggggctacaggtaaatattttgtctgctaaactgacgcccccatcgccagtgtctgaacaaacaaaactgagacatatctagtcagctgaagctgacaaatacaggggccaatctggttacaggcaggcagtcctggcctcgtgacaccgcagagactgtgggacaagtggacgtgctcctactgtccctcgcatcccccatctgggccgcgggactagtgccctcaggtctatgacccactgcaagaacccaaagctcgacgcccgcccagcccttcacatccgtcccttgcaacaagcaagagaagaggggcgcggcttcaggggacgggcgacggtttacaggacagctcgtacacagtaccagctgacatcccctaagcctgagtgtctaggcccctgcctccacatttaagagccgactgcgccccttggtgattggacgtccggacgcaccttgagtagaggccaagcaaactatcgagcccgtccaaaacgccatatttgtaactgacgtcatcctcatgttgcctttcctctctgtgattgaggaaccaatcagttgggtgtagcagacggggcgtggctcttcaggtagaggccgaaggggctgagagcggtcccaggcggccatcttgattcctggcatcactctcaacgtgccctccctctccgtgattggacgagcagggcgggccttccggaggcacacagccgaccaaccagagatctgcgcgtgctcgatctggtcatctgttttctgacatctggagccactagcagttatcctgttcattcctgggcgcctgcgaccttccgaaggaaacaagacttgcttggggaaagttgccttgccagtatagtggagcttggtagaaacttaaaaactgcctggggctgcctgggatggggatctcgagatgcttgtggggagcacattttaggaaacagggggctcaagctgcatgaaatgctgcgggaaataggaatgagagacgcagaatggtcggagaaaaaagctaggaaggtgtttgggagtaagattttggagtgccttgaatgccagactagggagtttggactatatcctgtaagataggggataaaaatcaactttaaacaggagtgatataacaagataatgtactttagaaaataattctgtaactgtagggggagtcccaaagtgtttctcaaattgtgttcggggaagttcaaagtgtgtttgagagcttgtttttatatgcagattcttgcccctcaccagacctgcaaataaagttctctggttgtacagccaggaaactgcattaaaaaaaaactttttaggttaacatacatttggtgagaaaacgcataaaccatatggatagggctctgaattttcacaagcaaacacttcagccaggcggggtggcccgtgcccctaatcccagctactcgggaggcttaggcaggagaatggcttgaggccaggagtaccagatcagcctgggcaacatagcaagacccgtctctaaaaaaatttaaaacaaaaataataacacactcccgtagttaacaccagatgaagaaacaacatggccagcagctcagaagctccccttttcccctttagccactgctgcctgcaccaaaggtaaatatgatcattacttataagaactgtagattagttttgcctgttttgaatttgatataaataaaagcatacaggatatattgtgtcagcttatttgttagtgttatttatgaaattcatccgcattgttccatgtagttgctgtagactccgttgctatagattgttatcacaatttatccagtctcttgtttatgggcctttgggtaatttccagtttggagatagtagcaaaaaaaatgctaaaatgaacattcttcttcattcatatcttttgctttgtaaattataaagcaagacaacaagacctaaagactgattcattcactacctatttattgagccccttaccagactaaggtgagaaaataaaacagaaaagacagcaaaggtcctgccctcatggaacttattctaactggaacgaaacaacacctacgtgggcagcaaaacaagtcaaacaattgcaattgtgataactctgagggaaacaaggtgagctagaaaaagaagggtggggacttaacctttttttatgtggtagcctggttaactctcagaaaaatatctaggaaaaaatacaagagataagttggcactgctacacgatgagtattaacaatgggtagaccattcctggcaagagagacaccatgtataaaggtcatggaggaggagagagcttggcccattcaagaccagtgtggcttcaacacaatgaaggagggatggcataaggtgtatctgggtattaaagcatatgatacaaggccagagtaagaagttgagattttattccaaatattatgaaaagcaatcgaactgttaaaaacaggaaataatgtgatctgatttacttacttaaaagatccctctaactgctgagcagagaacagattaaagacagaatttaggaggctgctagagcagtctcagggaagatatgctggcatagagcttagaggaaaggcttgaaatacatctgggaactgtcatggcaaagatcatcaccttaatcaagtgataaaaggtaacacctctctgcactggcctgggtaaaaatctaaagaataaaataccaccacaatattgggaacccatgtgtggtggtgtattcctgtagtcccaactattctggaggctgaagcagaactgcttgagcccatgagttcaaggctgtagcaggctacaatcagacctgtgaatagctactgcactccagcctgggcaacacagccagaccccatctcttcgaaaaaatgtatatgtgtgtggccaagcacagtggctcacgtttgtaatcctagcacttctgggaggctgaggcaagtgaatcacaaggtcaggagttcaagactagcctggccaaaatggtgaaaccctgtctctacttaaaacacaaaaattagccgggcgtggtggcaggcacctgtaatcccaggtacttgggaggatgaggcagagaactgcttgaacccgggaggcagagaactgcttgaacctgggaggcagaggtggcagtgagccgagatcgcaccactgcactccagcctgggtgacagagggagagtccatctcaaaaaaagaaagaaaaaaaaaagtgtttgtgtgtgcgtatatatatagagagagagagagtgaagagagagagaatgtattctgatgtgatgcaccaaggacatagcatttctaccaaaaattcactatctgaatccaatgaggaaaactccaacaaacccatgttacaaatttaacagttaaatctaaaactatcagttaaagactagagacctgataaataattgcaatttgtaatcctccattagatcaagagcctggaaaaacaattttttttcccatttgctccaaggaacataggagcaacaacttataaatttgaataaggactgaaggttagataatagtactattgcaatatcaatttcctgattttgataagtgtactgatgacataagagaatctctctgttgttaggaaatacacattttaagaacgtatagataggctgggcatggtggctcacgccggtaatcccaacactttggaaggccgagacgagaggatcgtcttcactcagaagttagaggctgcagggaaccatgatcgcgccactgcactccagcctgagcgactgagggagaccctgtctctataaaagaatgtaacgccaggcacggcggctcacgcctgtaatcccagcactttaggaagctgagggaggcagatcacgaggtcaggagttcgagaccagcctggccaacatagtgaaaccctgtctctactaaaaatgcaaaaaaattagccggccatggtggcgcgcgcctgtagtcccggctacttgggaggctgaggctggagaatcacttgaacccgggaggcggaggttgcggtgagccaagcccccgccactgcactccaacctgggcaacagaccgagactccgtctttaaaaaaaaaaaaatgtagcgatagaaggacatcatgtcggcaatttcctttcaaatgatatagcacatgcaaaacgttaacatttgtggaatctagaagggtttgtgggaattatttgtactagtttagcaatatttctgtaactgtgaattacttgaaaatgaaaggttaacaaagttactgagattaggagagaacgtgaggagcgaacagacctagccatgaataaccaacaaataaaactcgaggaaataaaaaggaactcaaatggcatgcgaccaacggaagacatagcttctgtactcttaaccctaaattactaagcgatgaccctcctgcagctttctaatccaaatcaccaaaaacaatctcgccgcccaactttgccaaaaagcaacttaacgccagccgactccgccatgttttcccagtgagcttgcgagcgcgtgcgtacgcacgcacgcacgcacgcaccaaccaatcggtgctcacgtcggtgactcgttaccgcaggggcggtgcgttcttctacacatgcgcagggttgggcgggtcttcttccttctcgcctaacgccgccaacatggtgagtcttactgttgcgggctccggggccgtcgaccatgccgctcgacctccacctccgctgggaagctgaggcgccaaacggctcccagagggtcccgggaagcgcatggtgagggtccccgggccggctgtgcagcggaatcgggcccttcccggactcgcgcccttcccggactcgccgctggcgagcgcgtggagggcccggcaggcctggcgcgccttgggccacgcgtgcgcgcctccgccgctggagctggatggctgatgcggctcgtggtccgagagccttgtcctgccgtgtgggccttgcggacctgggagctggcgggcgttgggaaccgggcttaagctactgaggcgtttgctgatttcgtccatccaggttggcgcctggctctcgggcgtttgttccctgcagcattctttttcgctgaatttaaccatgttgtctttagctgcagaaggtgacatatgtagcgagtatttctaagtaagtttcactgtcctttctcctccaattttaggtgttcaggcgcttcgtggaggttggccgggtggcctatgtctcctttggacctcatgccggaaaattggtcgcgattgtagatgttattgatcagaacagggtaagtgtcacaactttttactaaacatggcagtggacatgtgccctgcagatggcaataatgaattgtctcgatggctgtgtaagatgaggatgctatgggtagtcgctttattttaccattgaggaaacaggtaatggtacgggttttaagcacagcctgaagttagctattagtattgaatttcagtattagccacttaagctagagccagttataggctgaaacgttggttagttttaaatgagttactatacgtaaagtgagtttagaacagatccagcacgtagaaagcacttttgtatttactgctgtgtatttgaaacaagcaaactaaggagttgaccactgactataaatcagcagggatcagagtcctaaagttgcctgtaaattacatgtggttggtttctatggggtactatatagtttaagaaggagcatttaatgatgtggagaaatgtttgtgttgagcaaaagacatacatatatataacccagataggacaatccttgtcttttctgagcaatttattaaaatagtagtgtgggtttgatggccctgaacggataagtaatgttacagaaccatctgaccattttaattgctgttagattttgcactgaagttcttgatgtttgtgttctaggctttggtcgatggaccttgcactcaagtgaggagacaggccatgcctttcaagtgcatgcagctcactgatttcatcctcaagtttccgcacaggtaactgtccactaatcactcctccctcccatccccagatttgtttatgctagtaaaagtttgttttggagtaaacaatacggaagattcagagccatcctgaagagggatttgcatcatagaagtagacagggattatttacttttaaaatgtcttgcctgcgcgtgatagctcatgcctgtaatcccagtactttgggaggccacggtgggagggtctcttgagcccaagtttcaagaccagcatgggcaacatggcgaaaacccccatctctacaaaaaataaaaaaaaaattcgttgggcatggtggcacgcgcctgtaatcccaggtaggggggccttgggggtgctgagttgggaggatcgttttagcgaggtcgaggctgcagagagccgtgatcatgccactgcactccagcctggatgacagagtgagaccctgtctcaaaaataaataaataaaataaatgccttgaggtcacttttctatcctggtagtttagggctttgcctttgtttagatttgccatcttcttttcttctggtttctgccaaatttttagcttaaagtaaacaacaatactaagtcttgtgtttattgctactagctatcattagataagctctcagtgtgtgtcagttacacagtatttaatataagaggttttatccctagcttacatttaagtgaggcagtgaatagcagttcttttttgacatgaaaattaaaacactttagtgtgttgctatacagttaattcaacccacaatgatggttgcagtggaacatgtaattttgcatgctttaaaaaatagtcaaaaacttgctgtatgttggccgggcgcggtggctcacgcctataatcccagcactttggaaggccgaggcgggtggatcacgaggtcaggagatggagaccgtcctggctaacacggtgaaaccccgtctctactaaaaatacaaaaaaaaaatattccgggcatggtggcggacacctgtagtcccagctacttcagaggctgaggcaggagaatggcgtgagcccgggaggcggagcttgcagtgagccgagatcgcaacactgcactccagcctgggtgacagagcgagactccgtttcaaaaaaaaaaaaaaaaaaaaaacttactgtatgctgagcactacaggcactgtgggacgtgtattaacacataatggattttgaagtactggtagttgaaaacatgccacttgaacaacctcgagtgaacatagccatgctgctactactgtgacataccaattaggggtgaagcttgaggatacttgtcaaagttcaaagcagtagaaaatacttggtaacttagatttttcactaggtactcttgtaattctgccttggatccctggacaccctggattttatttttaggatgtttggccacaaattgttactgtaaatttttttttaaaaaaaagcctaacagttaatattaattaccttgtttgttacgagaatgaatggctcggatgtgtgcagtggctcatacctgtaatctcagcactctgggaggccaaggcaggtagataacttgaggtcaggaatttgagaccagcctagccaaccccgtctccactaaaagtccaaaaattagcccagtgtggtagtgtactcctgtagccccagctatttgggtggatggaacagaagaattgctagaacctaggaagcagaggtcacagtgagccaacgttgcgccagtgcattctccatcctgggttacagagcaagaccctgtctcaaaaaaagaaaaaaaaaaagaatggttttcaacacgtccactgcccgagtggaattatatatagtcagaggtgggttttttgtgttttttttgagggttttttttttcttttgacacggagtctcactttgtcacccaggctagagtgcagtgacgcaatcttgactcactgcaacctcaggctcccaagtagctgggattataggcacctgcaaccacgcccagctaatttttgtgtttttagtagagatggggtttcactatgttggccaacctggtcttgaactcctgacctcaggtgatccacccatcttgacctcccaaagtgctgggattacaggtgtgagccactgcgcctggtcaagaggtagtttttaaattcataaaatgggctgggctgggtgcagtggctcatacctgtaatcccagcacttcaggaggccaaggtggagggttgcttgagcccaggagttggagaccagcctgggcaacgtagcaagaccctgtctctacaaaaaatataaaaattagctgggtgtgctggtatgcacctgtagtcccagctacttgggaggctgaggcaggaggatggcttgagcctagaaggttgaggctacagtgagccatgatcatactattgcattccagcctgggtggcaagcaagatcctctctcaaaaaaaaaaagggactggattacagttttgattaaaatatgcttgaagttaataacctattctggcttactgaacacaaaaataagtaaaatacatagtgtaccaggtgttgtgtaacaggaagagtgcttttcaaggaacaaagaaagtgtctttgataatgagtgacttcaaagctgatttcttaatctgtggtcttggctcgttctagtgcccaccagaagtatgtccgacaagcctggcagaaggcagacatcaatacaaaatgggcagccacacgatgggccaagaagattgaagccagagaaagggtaataacttagggtcatttgaattctggtcctttctttttttggagggttcaagatagtgtgagagggataatttttatttgttgttttttttttaacagaaagccaagatgacagattttgatcgttttaaagttatgaaggcaaagaaaatggtaagatttaagatctgtatttttgtgtaacttagctttaaataataagggagcagtagccaaatcccatttcaggctgccagcttcttggaagctttctgtaaaaaaggagaatttatcttcatttgtatttcatgatgtccctatggaattgttacctttcttcagatgtagttgtagggaaacagactacttaatgccctttctaaaaccagcataaattggattttattgtatgtatacacaataagtgctttcttacattgataattttcagaggaacagaataatcaagaatgaagttaagaagcttcaaaaggcagctctcctgaaagcttctcccaaaaaagcacctggtactaagggtactgctgctgctgctgctgctgctgctgctgctaaagttccagcaaaaaagatcaccgccgcgagtaaaaaggctccagcccagaaggttcctgcccagaaagccacaggccagaaagcagcgcctgctccaaaagctcagaagggtcaaaaagctccagcccagaaagcacctgctccaaaggcatctggcaagaaagcataagtggcaatcataaaaagtaataaaggttctttttgacctgttgacaaatgtatttaagcctttggatttaaagcctgttgaggctggagttaggaggcagattgatagtaggattataataaacattaaataatcagttcctttttttttttttttttttttgagatggagtctcgttctgttgctcaggccggactgcagtggcgctatctcggctcactgtaagttccacctcccgggttcatgccattctcctgcctcagcctcctgagcagctgggactacaggtgcccgccaccgcgcctggctaattttttgtatttttagtagagacggggtttcaccgtgttagccaggatggtctcgctctcctgacctcgtgatccgcccgcctcggcctcccaaagtgctaggattgcaggcatgagccgccgcgcctggcctaaataatcagttctttaatctcactctctgcccatacttggataggtagtgcaaaatcattgcagtcataattgatcatgtcatgagaaatcatgataacttagaacaccaagtgacacaagtgacatttttttcttatggtcaccttggcttcagaacatcttttttccttgtacaaatatgtttgccataaataggtaaagtgacagcctcttgatgctcaagagtctagcagatttattttatttatttattttttttttttggagacagagtcttgctgtgttgcccaggctggagtgcagtggtgcgatctcagctccctccaccttccgggttcaagtgattctcctgccttggcttcccaggtagctgggactacaggcgcccaccaccatgcccagctaattttttttgtagagactgggtttcactatgttggccaggctggttttgaactcctgacctcgtgatccgcctgtctcggcctcccagagcgggggattataggcatgggccactgcacttggcctttttttgtttttttgagacagagtcttgatcttatcacccaggctggagtgcagtggcacgatcttggctcagcgcaacctctgcctcctgggctcaagcggttctcctgctcagccttctgagtagttgggactataggtgtgtgccaccacgtctggctagtttttgtatttttagtggagatggggtttcaccatgttggccatgctggtctcgagctcctgacctcaggtgatacacccgccttggcctcccaaagtgctggaattacaggtgtgagccactgtgcccggcctgcaaattttcttataaaaagtaaactaggaaaatagggcaagtataaaaattgcaggttgagcatatttctaatccaaaaagctctaacctctgaaactgagctatgacactacaatttaaaaatccctagcctacccgcatggtgggttatggtcaaaatacaggtacacagcactattcagtgtccctgaggaagaaatagttaaccttcagggtacatgtatatgaagcataaatgaatttcctgtatagacctaggtcccatccccaaagtgtcatgtatatgcacttaactccaacatcagaacacatctcgtcctaagtgtttcagataagagatacttatcctgtgtatagtaggttggacttctgtttctctctaccacaagatacaggtaatttggggcagtaaaagatcctggatagatttaaaaatactacaaagctgtacatgaaacaggattacttttttttttttttttgagacagagccttactcttgcccaggctggaatgtagtggcacgatctcagctcactgcgacctccacctcccaggttcaagttgttctgcctcagcctcccaagtagcaggggttaaatgcgtgtaccaccatgcccctctaatattgtattagagatggggttttgccatgtcagccagactggtcttgaactcctgacctcaggtgatctgtccgccttggcctcccaaagtgctgggattacaggcgtgagccaccgcttctggccaggaatacattttaaataaatttgtttcctaaccaaaagctagcttcaggcgtcactggggtaaaggaaaaagcacattgatttgcttgataataggcaagtggtatggtgtaataaggaaaatatggatgatttcggattacctgttctactctgggaggtagagaattgtctagagaaagtggcatctatacctaaaataagaagaaggtggtgtaaggggaagaatgacacgagataggaaataaacgaactgatagtgtagaggactggctcgggaccacatcaaggaagtaggttagtggttagatcgtgtaggggaacacgggaagctactgagggttttttaaaatggcgtgatatctcagatttagatcattgaactgttaagactgaatcttatgggatcaagactgggaatgctcgggttggcagtatgaagtttggcagtaatccaaggaagtgacagtggtaatgccatttaggtggtcttgatcatgcattggactgcagaaataagggagaaaacaatgtgtcagggtttctggtttgtacctctggttcattggttgtgagggaacatgaggcagggtaaagtttatctaggtaaaatgagttagttttcatgtagactatctgggtgtatatgcaaagactgcagacaatctatactaaaatcctggctctgcctcttgaaagctatgtagtttaggcacatagtcaaaatccagtttcctcatctatgtggtacgcttcagagtagttaatcatgatatgtagtccagtgactggttcccttggtaagagctgtgataatgacacaaggaggagaggtttcaggacagacttgggattcatgaatatgtaagtggtcactgattccccaggggtaggatgacaacaatcaagagacgaatagaggttggaaaggagtcatgaggggtgggaaactagcaggggcacatggaagctagggaaagaattttgcttgagatcgtcaaagtgaggggaagagggtagtaagcaaaggagaaatgttatatggggttcggaggttttgtgtttgtaaatctggagtgatgggcatgttcaaatgcttctgggaaaggagctaataggagagaaacttagcccttcgaaaaacaggaagggatggatcctaggggagaggaggaaggattggctttagaggaaagatgtcctttacgtgaggaaaaggaagaaaaggtgggtttagatactaaatctgtaggtttgctgttaggaaattaaggacttttcacctttatctctgaaatttctctggagttagcaaggcaaggtcatacactgagaaggagggatgaggcagtgtagatttgcagacatacaggttgtaattccttatggaggaaaggggagagcacttttgtcagactgcctgtggctttgagagccctttggctacagtccatgaggtgctcagaggatgagaaagcttcagggtagaagcagtattcaagctgcacctagaaaacagtgcaatacagaacagtggaaattggaaattccaatcttggaatctctaggaaagtaactgaggcatacgatgcctgaaaaggagtagaaaataaaattaataaggtgggaccatatgataagagatttgaggccgggcactgtggctcacacctgtaatcccagcactatgggaggctgaggcaggcggatcacctgaggtcaggggtccgagaccagcttggccaacatggtgaaaccccgtctttactaaaaatacaaaaattagacaggcatggtggagcatgcctgtaatcccagctacttgggaggctgaggcgggagaatcgcttgaacccaggaggtggaggttgcagtgagctgacattacgccatagcactccagcttgggcgacagagggagactctgtctcaaaaaaaagacttgagcaagggcgtaatcttcaggaaggtcagtctggtagcatagtgtggattgggttgggggatggggaaggagagcagaaaattattgaaatatccaggtgcataaaagtctactttgattatggagaactacacacttgttcagtcaccctcattggagacgggggatggcatacgaaaagaatgctgatttcaggctgggcacggtggctcatgcctttaatcccagcactttgggaggctgaggcaggtgaatcaggggttcaagaccagcctggccaatgtggtgaaaccctgtctctactaaaaatcaaaaaaaaaaaaaaaaaaatggctgatttcagagtcatattcaggtttaaattctgtcattcagcccaaactcattactttatgttacttatgggaacctcatctaaaaagcaaggatcctgatacctgcctcatattgtggcaaggatcaaatgagtcaaataagatgcttgtgaaagtgaggacaggatctatcctcaacacctagtgcaattctttttacacattaggtacttagtaatttgggttgaattgtgttgaactaacctggcggtataggcaaaatttggaagtttggttttcagaaagtcttgacttcctcttatctctaagtaattggcatgtcctctaattcatattttcccccctcatctgttgggtgaaatactgtttatcctttagtactaaaattaaaagttacctcattcttctagctagctgatttttttttttaatctaggctaaatcatgaatacatttacatttaaataaaatattacagttgaaagtaaagggtcctttcattatctccacttccaattccagtaccctgtgtaaaggaaaacatatacatcttgcagacattttttaatgtgtttgtaatataggtacataaaaatatatgtgcttgttttaagcaaatttcatactctgcaacttgccttttttcttaatacgttctggagatcttatctagtcagcctctaaattagagttcttcagaaaaccaatgggatggatgaatggactcaagagattgtggaaaccaagaagtcccacaaaataccatctgcaagctggagaaccaggaaagctgattgggataattcaaactgggtccagaggcctgagaactggaagggccagtggtgtaagtcctggtctgagaccaaaggcttgatcaagaatcaagagcatcaacaaccgagggcaggagaggatgggtttcccagattaaaaaagcaaattcacgcttcctcccccattttgttctatttgaaccttccgtggataggatgatgcccacctgcattggtgaaggtcatctttactcagtctacccattcaaatgccaatctcttccagaggtaatctcacagatttagaaatgtttcgccagctagctgaacaatccttagcccagtcaagtgcacacataaccataacaattcttactaatctacctcattcttttttatcttctgcataataatccacaacatgaatgttcacgtttgacctctattgatagacatttcggatgatgccaatttctttttctggtttttgttttttgtgtgtgtgtgttttttttttttttgagacgaggtcttgctctcgcccaggctggagtgcagtgggtggggtgatctcggctcactgcaacctctgcctcccgggttcaagcagttctcctgcctcaacctcctgagtagctgggattacaggagtgtgccaccacacctggctaatgtttgtattgttagtagatacagggtttcaccctgttagccaggatggtggatgggcatttgaatgggtagactgagtgatcctgacctcgtgatccactccccagtctcccaaagtactgggattacaggcgtgagccacggcaccaggccctctttttctatttaaacagtgcttccgtgaatgtccttgtgtacacctccttctgtacacaatgatgtttatctgatgcacattgccaatcagtgcacttgctggattgaagaatgtgagtgtttgtatcactctttcagtaggctgtaccaatttagacttgctctaccaatttagatttccatcagcagtaaacaaagacattcctgcctggcagtcttgaactcctgctattatctcttaaatttttgccagtgtgtgaaaagtagtatcttactttaacttgtattttcctggtccaatagtgcactaaatgcccgagttctgtatttattctatttggatagccattagatagccattaagtccactcatagagttattttaaatgttttcctttagtttccaaccacattttcaaataaaatttagaattagcttgtcaagtaagttgtcatattgtgatttttgagattgcattgaatttatagatatgttagatagaacaaactcaccgtcttcataatactacgtcttcgatccaggagcatggtatatttccaactacttgggccgtcattcttttcaaaattaaaacaaaaaaacaaaaaaaaactgtatcttggcttattcctggtgattttttgtttgtttgtttgagatggagtctcgctttgttgcccaggctggagtgcagtggcgcaatctcagctcactgcaagctctgcctcctgggttcacgccattctcctgcctcagcctcctgagtagctgggactacaggcgcccgccaccactcctggctaattttattttttttatttttattttttttttgtatttttagtagagacggggtttcaccatgttagccaggatggttttgatctcctgacctagtgatcctcccgctttggcctcccaaagtgctgggattacaggtgtaagccaccacgcccagcctctgtttgtttttgagacgagtctctgttgcccaggctggcgtgcagtggtatgatctcagcccattgcaacctctgcctcctgggttcaagtgattctccccccacagcctccccagtagctgggattacaggtgcgcaccaccacactggctaatttttgcatttttagtagagatggagtttcactatgttggccaggctgatctcgaactcctgacctcacatgatgcacctgcctgaacctcccaaaatgctgaaattacaggtgtgagccaccacgcaggccatattcctagtgattttgaactagtatcagttcctagtattttttttttttttttctgagacaagagtctcgctctgtcgcccaggctggagggcagtggcgcgatctcggctcactgcaagctccgccttctgggttcacgccattctcctgcctcagcctcctgagtagctgggactacaggcgcccgccaccacgcctggctaatttttgaggccgagtcttactccatcgcccaggctggagtgcagtggcaagatcttggctcactgcaacctccgcctcccaggttcaagcagttctcgtgcctcagcctcccaagtagctgggattacaggtgtccaccaccatgcctggctaatttttgtatttttagtagagatggggtttcactgtgttggccaggttggccttgaactcctgacctcaagtgatccacccgcctcggcctcccaaagtctgggattacaggcataagccaccgtgcctggcccctagtatcttttctaactggacgttgatggatgtaaaggggctgaggatttttgtatttaacatcttatgtgtgtccacattgctaaactctcttattgttttaatataattttttagttgattttttttaattttcttttttttttttcctttttttgccccccttgagacaatgtcttgctctgtcacccaggctgagtgcagtggtatgatcatggctcactgcagccttgacctcctaggctcaagtgatcctcctgtctcagcctcccaagtagctgggactacaggtatgtgccaccatgcccagctaatttatttttattttatttatttatttatttttgagatggagttttgctttttttgcccaggctggagtgcaatggtgcaatcttggctcattgcaacctctgcctcccagcttcaagcgattctcctgcctcagcctcccgagtagctgggattacaggtgccacccccgcccctcccaccaccaccaccgtgcctgctagtttttttgtatctttagtaaagatggagtttcaccatgttggccaggttgttctcaaactcctgatctcaggtaatctacctgcctcggcctcacaaagtgctgggattacaggcgtgagccacagtgcccggccttttttaatgctttgtagagacagagtctcactatgttgcctaggctgatttcgaacttctgaatgcatacagtccacctgccttggcctcccaaggtgctaggattacaggtgtgagctactgcgcctggctggatttcttggattttctgtgaggataatgatgaaaacaacttctccattaaaaaattgtattacacgtcaggtatagaaaatctcaataaaatgatatattcttagctattttaatggataaacatgcaactcttttcaaatctatattattgccactcctttcaaataactgtttggaacattgccctcccggatgagtaccacactgtcttatctcccattccttcatgtcacaaggccccaaggcaattcttggaaaacgactgcctgattttatatctttataaaacaaatcctgtaactgtgatgtgctaaggaatagaagtgtttacccagcccctggttagtgaaaattcctcctttcctccagtgaacattttataataatgaagtcttatcgttaaattctgagtctgtggtcttttctataataataattatgtgatctacaaataatgataattctgtttcctatatctgctacatttttttaaatttatttttatttttgcttttttgttctgatttcttcgtcctgtccaactgaaactttgtaccctttgaccagcatgtcaccatttacccatctcagctgctggcaaccaccattttactctctgcttctgtaagtttaacttttttgagagagagagagagtcttgcttcgtcgcccaagctggagtgcaatggcgcaaccttggctcactgcaacctctgcctcctgggttcaagtgattctcccgcctcagcctcctgactagctgggattacaggcatgcaccaccacgcccagctaatttttttttgtatttttagtagagacgtgttttcaccatgttggccaggatggtctcgatctcttgacctagtgatctgcctgccttggcctcccaaagtgctgggattacaggtgtgagccaccgtgcctggccaacttttttaggttctacatataagtgagatcatacagtatttgtctttctatgccttattcactaagcttaatatcctccagtttcatccatgttgtgacaatgacaggattttttccttttaaaggaggaataatatgtcattttgtgtgtgtgtgtgtgtatacacattttctttaccattcatccattgatggacacataggttgttccatgtctcagctgttgtgaataatgctgcaattaacatggaagtacagatacctctttgacatactgattttattttctttggaaatgtatccatgtaataggattgctgaatcatatggtatttctatttttaattttttttagaaacttccgtactgttttccatgatggttggacaaatttgcattcccatcaacagtgtacaagggttccattttctccaccacctacatgttatctgttgtcatgttatgttatgttatgttatgttatgttatgttatgttatgttatgttatgttatgttattttttattttgagacgaagtctcactctgtcacccaggctggactgcagtggcatgatctcagctcacttcaacctccgcctccctggttcaagtgattctcctgcctcagcctcccgaatagctgggattatgggtgcccaccacaacccccgtcgtctgatttttgtattttagtagagacgggtttttgccatgttggccaggctggtctctaactcctgagctcaagcgatccacctgcctcggcctcccaaagtgctgggattacaggcttgaaccactgcacccagccatctgtttctttttgataacagccattctggttgggcatgatgtctcacgcctgtaatcccagcactttgggaggtcgaggtgggtggatcacttgaggccaggagttcgagatcagcctggtcaacatggcaaaacccggtctctactaaaaatacaaaaattactcgagtttggtggcgtgcatccgtaatcccagctacttgggaagcggaggcatgataattgcttgagcctgggaagcagaggttacagtgagctgagatcacttcagtctgagcaacagcgagactctgtctcaaaaagtaataataataataatacagccattctaagaggattatggtgattatcacatttgcatttctctgatgatgagtgatgttgagcattttttcatctttctgttggtcattcgtatgtcttctttggagaaatgtctattcaggtactttgcccattttttaatctagttatttgtattcttgctatagagttgagtttcatatatattttcttttctttttttttttttttttttttttttacacagcgtctcactcttgcccaggctggagtgcagtggtgcaatcttggctcactgcaacctccgcctcctgggttcaagtgaccctggtgcctcagcctcccaagtggctgggattacaagcacgtgccaccacaccttgctaatttttgtatttttagtagagatgaggttttgccatattgctcatggctgatctcgaactcctgacttcaagtgatctgcctgcttcagcctcccaaagtgatgggattacaggcgtgagccaccatgcccagctgaggtacattccttcttttttatttttttgagacagagtctagctctgctgcccaggctggagtgcagtggcacagtttcagctcactgcaacctctgcctcccaggttcaagcaattctcctgcctcagccctctacagtagttgggattacaggcgtgcactaccatgcctggctaatttttctatttttagtagagactgggttttgtcatgttggccatgctggtctcgaactcctgacctcagatgatccacccacctcagcctcccaaagtgctgggattacaggtgtgagccaccgcgcctggcctgagccaccatgcccagatgtacattccttctatgtctaatttggtgagagttttttttttatcatgaaagtatgttgaactttgtcaaatgctttttctgtatccattgagatgatcatatgatttttatttttcattttgttaatgtggtatatcacactgatcgatttacatatgttgaaacattcttgcatctctggatgatcatagtatatgatcccaccctatcatgggcaggagaatcgtttgaacccaggagggggaagttgcagtgagccgagaccgcgccactgcactccagcctgggtgacagagggagattctgtctcaaaaaaaaaaagaaatcagaaaaataagaataatcaaacatgaagtatgactaaaacagactcagaagaaagcttatagacataaatacaagtatgagagaaccaaaaagctataaaaaattaggcatgctattcaaaaactagaaaaagaatatacgtctttcagattttaagaaataaatcaataatgataaaatgaaacacgatatggtattagacgtgttcatgaaaaagaaaaatgatactaaaaatcaatgatatagaaaaagcaatgaaatatgaaaaaactaaaagttggttctgtgaaaaattcaataaaagagaaaaagtataggtaaacagtaattgatacaagaaaagggacaaatcccttcagacatggacatataaaaagtaagatgattttgtatcagtaaatttgacagcctatgccaaattattttctatggaagaaagtaccaaaattggttaaaggcattaaaaacctgaatggactaataaccacacaagagacggaaaagttgtcaaatataaaaaggtgttgggtccagaatgacttataacaggtgaaattttcatacctttataggacattttggccctaagttatgctttcctaaataatatgaaactgtatatataccttctatagacatggtctcactctgttgcccaggctggagttcagtagtgtaatgagtttcttggttggatgcaaactggtgcattcactgaggtgggggaaccctggaggaggaacagggggatgagggaaggatgatgagattagtttggaacattttgaattttaggcttttgtagaataattagaaatcaacaggcagtttcaaacccagacctctaactccaagctatctgcacactgcctggccaataggaagcactattgccatgagtgttattaaatctggactgcagaaagagatacgggagtgtcttacaggagagtggtgagatacgcacgaataataataatgtcagcaataatatagcacttattttgacttagttcagtacagaactggactctgtccataaaaagagtcaaactcagtaaaatatttaaagagatttattctaaactaaatatgaggaccagtgacccacgacacagccccagggggtcctgagatcttgtgctcaaggtggtcgggctacagcttggttttacatgttttaggaagatataagatatcaatcaataaatgtaggatgtacattagctccatccggaaaggagggacaactcgaagtggggagtgtgggggcaccttccagggcgtaggtggattcaaagatttcctttcctttcctttcctttttcctttcctttcctttcctttcctttcctttcctttcttttcttttgaagatttctaactggcaattagttgaaagagttatggactgggcacggtggctcacgcctgtaatcccagcactttgggaggccgaggcgggcggatcacgaggtcaggagatcgagaccatcctggctaacacggtgaaaccccgtctctactaaaaatacaaaaaattagctgggcatggtggcgggcgcctgtagttccagctactcaggaggctgaggcaggagaatggcatgagcccgggaggcagagcttgcagtgagccgagatcgcgccactgcactgcagcctgggcgacagagcaagactctgtctcaaaaaaaaaaaaaaaaaaaaaaagttattagctaaagacctggaatcaattgaagggaatgtctgagttaagataaggggttttggagaccaatgttcttattatgcagatgaaacctccaggtagcaggcttcagagagaaacgattgtaaatgtttcttaccagacttcaaaaggtgccaaactcttagttaattctctactggatcaaggaaaacactttgaaagtgaaggggattctttacaggatgtagattttcttcacaaaagacagctttacagggtcatttcaaaatatgtcaaagaaatacattttagggtaaaatacttcagtttatttcagggcctgttatctgtcacatgagactatactagagtcaggttagaatttgatgtcttattgctataaagagtttgttttgggctgggcgtggtggctcacgcctgtaatcccagcactttgggaggccgaggcgggcgatcacgaggtctagttcaagaccagcctggtcaacatggtgaaatcccgtctctactaagaatacaaaaattagccgggcgtgttggcacgttcctgtaatcccagctactcaggaggctgaggcaggagaattgcttgaacccgggaggcggaggttgcagtgagccgagatcgggaaactgtactccagcctgggctacagagtaagactccatctcggaaaaaaaaaaaaaaagttttagtcagtctcaagatctctgttttaatgttaatgctggtccgtagtgcctgaattccaagggcataacgaggcaagtccgatcccctgcttcccatcatggcctgaactagattgccaggttttctttggaatgttttggctgagagaagtggtccattcagttggttgggggacttagaattttatttttggtttacaaaactgttgcatgaattgactcagttaattcactgaatttataaattacaaacttttaccattctcaactgataaattgaggcaacgatttaagtataacttgagcaagtccatatagagtggagccaggaacgcagacaatgagacaccataccccatggtcttaggtcacagtcattcagtgggagacaggggctataaattcattagaaggttaagttaggaattaagtaattaggtaaggaattaggaattc

SEQ ID NO: 2 - DNA, 5059 bp, Homo sapiens
acatgcgcagggttgggcgggtcttcttccttctcgcctaacgccgccaacatggtgagtcttactgttgcgggctccggggccgtcgaccatgccgctcgacctccacctccgctgggaagctgaggcgccaaacggctcccagagggtcccgggaagcgcatggtgagggtccccgggccggctgtgcagcggaatcgggcccttcccggactcgcgcccttcccggactcgccgctggcgagcgcgtggagggcccggcaggcctggcgcgccttgggccacgcgtgcgcgcctccgccgctggagctggatggctgatgcggctcgtggtccgagagccttgtcctgccgtgtgggccttgcggacctgggagctggcgggcgttgggaaccgggcttaagctactgaggcgtttgctgatttcgtccatccaggttggcgcctggctctcgggcgtttgttccctgcagcattctttttcgctgaatttaaccatgttgtctttagctgcagaaggtgacatatgtagcgagtatttctaagtaagtttcactgtcctttctcctccaattttaggtgttcaggcgcttcgtggaggttggccgggtggcctatgtctcctttggacctcatgccggaaaattggtcgcgattgtagatgttattgatcagaacagggtaagtgtcacaactttttactaaacatggcagtggacatgtgccctgcagatggcaataatgaattgtctcgatggctgtgtaagatgaggatgctatgggtagtcgctttattttaccattgaggaaacaggtaatggtacgggttttaagcacagcctgaagttagctattagtattgaatttcagtattagccacttaagctagagccagttataggctgaaacgttggttagttttaaatgagttactatacgtaaagtgagtttagaacagatccagcacgtagaaagcacttttgtatttactgctgtgtatttgaaacaagcaaactaaggagttgaccactgactataaatcagcagggatcagagtcctaaagttgcctgtaaattacatgtggttggtttctatggggtactatatagtttaagaaggagcatttaatgatgtggagaaatgtttgtgttgagcaaaagacatacatatatataacccagataggacaatccttgtcttttctgagcaatttattaaaatagtagtgtgggtttgatggccctgaacggataagtaatgttacagaaccatctgaccattttaattgctgttagattttgcactgaagttcttgatgtttgtgttctaggctttggtcgatggaccttgcactcaagtgaggagacaggccatgcctttcaagtgcatgcagctcactgatttcatcctcaagtttccgcacaggtaactgtccactaatcactcctccctcccatccccagatttgtttatgctagtaaaagtttgttttggagtaaacaatacggaagattcagagccatcctgaagagggatttgcatcatagaagtagacagggattatttacttttaaaatgtcttgcctgcgcgtgatagctcatgcctgtaatcccagtactttgggaggccacggtgggagggtctcttgagcccaagtttcaagaccagcatgggcaacatggcgaaaacccccatctctacaaaaaataaaaaaaaaattcgttgggcatggtggcacgcgcctgtaatcccaggtaggggggccttgggggtgctgagttgggaggatcgttttagcgaggtcgaggctgcagagagccgtgatcatgccactgcactccagcctggatgacagagtgagaccctgtctcaaaaataaataaataaaataaatgccttgaggtcacttttctatcctggtagtttagggctttgcctttgtttagatttgccatcttcttttcttctggtttctgccaaatttttagcttaaagtaaacaacaatactaagtcttgtgtttattgctactagctatcattagataagctctcagtgtgtgtcagttacacagtatttaatataagaggttttatccctagcttacatttaagtgaggcagtgaatagcagttcttttttgacatgaaaattaaaacactttagtgtgttgctatacagttaattcaacccacaatgatggttgcagtggaacatgtaattttgcatgctttaaaaaatagtcaaaaacttgctgtatgttggccgggcgcggtggctcacgcctataatcccagcactttggaaggccgaggcgggtggatcacgaggtcaggagatggagaccgtcctggctaacacggtgaaaccccgtctctactaaaaatacaaaaaaaaaatattccgggcatggtggcggacacctgtagtcccagctacttcagaggctgaggcaggagaatggcgtgagcccgggaggcggagcttgcagtgagccgagatcgcaacactgcactccagcctgggtgacagagcgagactccgtttcaaaaaaaaaaaaaaaaaaaaaacttactgtatgctgagcactacaggcactgtgggacgtgtattaacacataatggattttgaagtactggtagttgaaaacatgccacttgaacaacctcgagtgaacatagccatgctgctactactgtgacataccaattaggggtgaagcttgaggatacttgtcaaagttcaaagcagtagaaaatacttggtaacttagatttttcactaggtactcttgtaattctgccttggatccctggacaccctggattttatttttaggatgtttggccacaaattgttactgtaaatttttttttaaaaaaaagcctaacagttaatattaattaccttgtttgttacgagaatgaatggctcggatgtgtgcagtggctcatacctgtaatctcagcactctgggaggccaaggcaggtagataacttgaggtcaggaatttgagaccagcctagccaaccccgtctccactaaaagtccaaaaattagcccagtgtggtagtgtactcctgtagccccagctatttgggtggatggaacagaagaattgctagaacctaggaagcagaggtcacagtgagccaacgttgcgccagtgcattctccatcctgggttacagagcaagaccctgtctcaaaaaaagaaaaaaaaaaagaatggttttcaacacgtccactgcccgagtggaattatatatagtcagaggtgggttttttgtgttttttttgagggttttttttttcttttgacacggagtctcactttgtcacccaggctagagtgcagtgacgcaatcttgactcactgcaacctcaggctcccaagtagctgggattataggcacctgcaaccacgcccagctaatttttgtgtttttagtagagatggggtttcactatgttggccaacctggtcttgaactcctgacctcaggtgatccacccatcttgacctcccaaagtgctgggattacaggtgtgagccactgcgcctggtcaagaggtagtttttaaattcataaaatgggctgggctgggtgcagtggctcatacctgtaatcccagcacttcaggaggccaaggtggagggttgcttgagcccaggagttggagaccagcctgggcaacgtagcaagaccctgtctctacaaaaaatataaaaattagctgggtgtgctggtatgcacctgtagtcccagctacttgggaggctgaggcaggaggatggcttgagcctagaaggttgaggctacagtgagccatgatcatactattgcattccagcctgggtggcaagcaagatcctctctcaaaaaaaaaaagggactggattacagttttgattaaaatatgcttgaagttaataacctattctggcttactgaacacaaaaataagtaaaatacatagtgtaccaggtgttgtgtaacaggaagagtgcttttcaaggaacaaagaaagtgtctttgataatgagtgacttcaaagctgatttcttaatctgtggtcttggctcgttctagtgcccaccagaagtatgtccgacaagcctggcagaaggcagacatcaatacaaaatgggcagccacacgatgggccaagaagattgaagccagagaaagggtaataacttagggtcatttgaattctggtcctttctttttttggagggttcaagatagtgtgagagggataatttttatttgttgttttttttttaacagaaagccaagatgacagattttgatcgttttaaagttatgaaggcaaagaaaatggtaagatttaagatctgtatttttgtgtaacttagctttaaataataagggagcagtagccaaatcccatttcaggctgccagcttcttggaagctttctgtaaaaaaggagaatttatcttcatttgtatttcatgatgtccctatggaattgttacctttcttcagatgtagttgtagggaaacagactacttaatgccctttctaaaaccagcataaattggattttattgtatgtatacacaataagtgctttcttacattgataattttcagaggaacagaataatcaagaatgaagttaagaagcttcaaaaggcagctctcctgaaagcttctcccaaaaaagcacctggtactaagggtactgctgctgctgctgctgctgctgctgctgctaaagttccagcaaaaaagatcaccgccgcgagtaaaaaggctccagcccagaaggttcctgcccagaaagccacaggccagaaagcagcgcctgctccaaaagctcagaagggtcaaaaagctccagcccagaaagcacctgctccaaaggcatctggcaagaaagcataagtggcaatcataaaaagtaataaaggttctttttgacctgttgacaaatgtatttaagcctttggatttaaagcctgttgaggctggagttaggaggcagattgatagtaggattataataaacattaaataatca

SEQ ID NO: 3 - DNA, 41421 bp, Homo sapiens
gcgctggccgcgggccgcctctgcggcagcgctagtcgccttctccgaatcggctccgcacaggtaagatcaggggacccggcgcctgagctgccgaggaaggagtcgggggtgctgcgtgagactgagagttgggaggcaaagaaacaaaatcggatttcctcagagggccagaggaagagactgaaacacggtagccccaaatccttgggcggctgggaggtggtccctgtcatgcccacgacgggtgggcgcgtctttaccgacagcctgcatggatccgcagatgtgctgggcgcttagatgcctgcggctatgcagagacgcagtccagagaggtgaccccagatcctggtgggggctggatcccagggccccgacatccctttgcaatttccagccagcagctaaagactcccttcccggggctttagagaggctccaggctcgcgatccatgaacacacaaaaaccttccttgctcatgttctgaaaaaaagccccgcctcagctttgtgaatgttaataatagggggaagatttgttctctcttgggtgtgtgtacaggtggaacaatctgcagaaaaagaccttttttcggaaaaccttttcagtttgaagtttcagcaaatccatttttcatttcctttcatttggggagatgacatgaaatttaagctccagctttggggctgtctctgaagttctggggttcggcttacctttcccgggatgaggttttgatttggaggaagtaaaatgggttttgtcttaacctgggctcgttctttaaacttgtgaggccggggcggtggacttactgacatcctgtattctctcacctgcagctaggagaaaagatgttcactgtgctgacccgccaaccatgtgagcaagcaggttagtatctctcagcaggtagcaagcgtggttttgccaaatcgcaagagaaccccagcttcggcctacagtttttcatccatatcccctgcaaatgattgtttaactttattggtttgagactcagtactcagctgggtttcaacaccggcattcctcaaataaaagtaatgcttttcatcaaagccacacaaaacaaggactaacatgcatgtttcacttaaatggtttttccggtttgtataatccattaatttggcccttgtggtttcccttagctagctgtgtgtaacgtttgctttagaatactgtattgttgattttgtgatcaattgtacagtacttggatctttcctgtattcccatccaaatgttgctggcacagtgcctacaacacccccacccctcactgtgagtcagtgttgttatggttgatactgcaggcacaagtgcaggattttctcacactggaaggcacacacacacagacacacacacacacacacacacacacacacacacacacacttctaagcttgccccgcctgcctctagagcactttttggagttgctcatgtggaagcccagaaggctctggcttctccaagctcaggtaggtaccttgcaattaccatgtttgtccagccctaatgacagcacagctctaggctgcatttcctaaatgagtaagacctggtctcatccattttgctttgtaataagcttttctgcaaggacaagagtttgcttaaggtaatcatagctttttacttgaaaactgctgaaacacagaagacttaggaggccagccacgtagctgtggtcaggaaactgcatacatatcacacactcctcccccatggatagacattctttagtcatgcccctaaattgggtattcttgtcttccaaaaggatatgattttaggatagtaagggcaatctatatgaacttttatttttgtaaagggacattgcacttgaggagctgttttcctttgatctttaggttttcccccaaaacactttgaaatgttaacacagattgtaacgtcactcatacagactaacctgttacattccttccaaaggacaagtttaacttggcagattaaatttctaccccattttgttagagggaaaaaatcccttaaacttctataactaacactgacaaatgcattctttgaaagctaatgcaaaagtttgcctctgtggattaactggttcctgtacttttatttggaatcacagaaaagtgatacaggacctctttacatgctctgcaggtcaactccatggcagttggctctcctttccattgctattacccacaattctgtaatgagtaaccttgtgtctaagtcattttacacatgtggagctagttctgtgggataacttcccaaaagagtgattgtgagtcagatggcatgcttatttgcagttttcataaatattgacaagttgccctccattgatgctgtaccagtttacactttcaatgacaaggtaggaggattaaggtgttaagtgaccaactttgacaccaagaagtgtctgtgactgcagctacactgcaggggaatcagttgagatggaaagagttagctgttctgagccatgaagacctactgcgtgactgccctcctgtagcaaatgttgtgatgtgactgaatttgggggctgaatctaattatatcgtgggcgcatagacatgccctgttattcttctgggaaaatggcttacagaaataatggaggggtaaagcataggttataatgatctaggaataatgttctggaataagacaggatctatccaattgctgttcaattgatcttcctataatgatgaaaatgttatatggctgcactgtccaatatagtagccactagcccacatgtggttattgaacactggaaatgtggctagtaagattgagagactgcatttttttattttaattaatttacatttagatagccaattgattagatatatattggaattcgatgaatctagtgatctttctattagtgttcatcatatttcaaccatttggttgtcatttatgttgatgtcccaatagttttaccaagactattattattatttttttagagacaaggtctcactctgtcaccaggctggagtatagcggcacagctcactgcagccttgagctcctgggatcaaaggatcctccaacttcaacctcctgagtagcttgggctacaggtgtgcaccacatgtacagttgatttttttcattttttgtagagacggggtctcactatgtggctcaggctggcatctaacgcctggcctcaagcatcttcccatctcagcctcccaaagctgggattacaggcataagccactatacccagcccaagattattatttagtcagtattttcattgaatgtctttttatctttttaaaaaattaggtataacttctattcagtgaaatggatagatcttaagtcgtgcccctaagttgggtgttcttgccttctaaaagtatgtttttagaatagtaagggcaatttataagtttataatgtttttttaaaaggaaattatacctaagacactgatttgctttcattttcaagttttctccaaaggactttgaaaggtttgatgagttttgacaaatgcacacatccatatactccacactctgtatagcgcattgccattaccccaagaaagtgcccacatattccttctcagtgaatccctgccccaacttctgccccctggcaatcactattctgattcctgttaccttcctacttttgaacttcaaataaatgaaatcatttcagtatagtatagtactaatttttttatttttattttattttattgagacaaggtcttattctgtcacccaggctggtgtgtagtagtttgatctcaactcattgcaacctccacctcctggcttcaagcaattctcccacctcagtctcccgagtagctgggactacaggcgcatatgatcacacctggctaatttttgtatttcttggtagagacatggtttcaccatattggccaggctggtcttgaactcctgacctcaagtgatccacccacttcggcctcccaaagtgctgggattacaggggtcagccatctgcccagcctaatttctttttctttaactgagattatttttaaatgaaatattctatgagattatttttaagtgaaatattctatcacctggtttaattttttaaaaatagattttttgaatctccattaaaactaatgttagctgggcgtggtggctcacacctgtaatcccagcactttgggagaccgagacaggcagatcacttgagcccaggagttcgagaccagcctggccaacatggtgaaaccctgtctctattaaaaatacaaaaattggctgccgtggtagcaggcacctgtaatctcagctattcaggaggcagaggcagaagaatcgcttgaacctgggagttggaagctgcagtgagccaagatcacggcacagcactctaacctgggcgatagagtgagactccatctcaaaaaaaaaaaaaaagaaaagaaaaagaaaaaagtaaaacaaatgttattgtaattcatctcagggataaccaaaatatcagaaaactagaccatgcataccctccctgcaacactgttttagtacacaatttgtgaggaagggcaaataggtattgtttgtgcttccccaaaactggggagaaggggagcttatttgctactccatcttagaagtgtgggtctcgctaacaccagagaaggtggtttatgcacctgattatggggccagtccatcaattctacaaagaataccagtgcctggtttttacctccccctcaagtgtcttctgggtcttctcattttaggcctcaaggccctctaccgaactccaaccatcattgccttggtggtcttgcttgtgagtattgtggtacttgtgagtatcactgtcatccagatccacaagcaagaggtcctccctccaggactgaaggtaagtgtgaagggactggcaacaaagggaagaaatgagcataaaggggaagaaatcaattattccaaaaccatgagttagaagagcagaaaatcctttccccccatctctggctgaagccaggagaagttagtgtaagacgcaagggagaaggtctggacatgctgggtttgtgatatttgaggctacaaattgagggtagtgactgacaccttctccaaggactgtgtagtcttgctttgacttctgacttcaaagctaaaatttgtaaccaagagttgcagatagctatcaaagatttaccagttcagccaggtgcggtggctcacgcctgtaaggcactttgggaggctgaggcaggtggattgcttgagtccacgagttcgagactagcttgggcaacatggtgaaacccatctctatcaaaaaaaaaaaaaaaaaatttaccggttagtgcactttccattttgaccagtttatctgttctcccaaccacacaaccctgataatgagtaaagaccgaggctgagcacagtggctcatgtctgtaattccagcacttcgagaggccgaggaagaaggattgcttgagcccaggagttcaagaccaacctgggcaatatagagagactccatctctaccaaaaagaaatttttccaaaaaaaggaaaaaagaagtcaagaccaggagacccaggcacctcttctagcctaggctgagtgaacaaaaaatcaagaacttgagaaggtctccttgagctctatttgtgctgctactcttgagtctagaacatgtgctgtgttccttccaacacttccctcaacaacacccccccggcaaaaaaaaaaaaaaaattactcaggaccttgtgcttagtcccagaggcccctcttagttctcaacaagtccatccccaaatgatctttaggctcagaatcataatatatccccaggcttggctctgagggtgcccttggagacaggaggtgattccatgagaggctgacaagggaaagatgaagcaagttgatgagtccttcaatcattttgggtaggggtcagcaaacatttctcataaagggtcaaatagtatatattttaggctttgaggtccatttatagtctctgttttataactcttctttgttttttgactcattaagaatgtacaaacccttcttagctgtgccatagggaccaggtaattcagccatgttctttgaatctcatttaacatttacacttgacctcacaagtcttttccatatcttcctgctgttagtgactattcaaaggtaatatttgaaatacatagacatttttaaaagaaaagaaactaatattgttttggactctaaggatgggtttgagctaacattctaaggcagcttttctaaaagattagagtaaaatctccattagataatataatagcatttggttccttgataggatattttatttaagaatctcagccctcatgaataatgtgaattaaaaattaaaaaaaaaccttatgcaatcacccaataatgagaagaaagcaaattacccagttgtccaaagatattagctgaggcctaaaagaaggtgttttcccaagctccaggcactgccttctacaaactactgtatataaaattgggactttgggaggccgaggcgggcggatcacgaggtcaggagattgagaccgtcctggctaacgtggtgaaaccccatctctactaaaaatacaaaaaattagctgggcgtggtggtgggcgcctgtagtcccagctagctactcaggaggctgaggcaggagaatggcgtgaacccgggaggtggaggttgcagtgagctgagatagtgccaactgcattccagcctgggcaacagagcgagactctgtctcaaaaaaaaaaaaaaaaaaaaaaaaaaggaactgcaactaagagtaatatattttttattttttattttattgttattattttgtgagacggagtcgtgctccgtcacctaggctggaatgcagtggcatgatcttggctcgccccaacctctgcctccacagttcaagtgattctactgcctcagcctcccaagtagctaggatcacaggtgcccaccaccatgcccagctaattttttcttgctgtatttttagtacagatagggtttcaccgtgttgaccaggctagtcttgaactcctgacctcaggtgatccacccacctcagcctcccagagtggtgggattataagcatgagccaccgtgcccagccgcaactaagagtaatatctctttacactttgtatagtgctattcagttaagtcagcgcttttccctcattacatcacttagttcttatgccaaccatagaaggtggacaaagcgagcaccatgactgccattttgaaagtgagaaaatacaggtttggtcagtgaatgacaggtccagaactgaaacctggtcccttctgttcccaaggccagggctctcttcactgcctcccacttctccctgaccctgagttctgaatggagatcccaaatggagggaagggattggcctcagataagagaacacttcctgctttgcacaggatggaaaggtagggaggatgcatgcagatgtgggaaggtttgttgaattgaaggagaggagttaagcctagtaccacccttagaccctgatagctgggctgcctgccctgggccccacatttcagaaggaccagctctagttgcacttcaggcttatctctctctatgacccaaacgaatgtgtttacccagagcccatgtttccccttctagaacacactgtggtgcccaagacttcagaatctagggtcttcgtggacctccagaaggtggacatcaccaatggtctgaggggtggccaagaggcagctgcttacagggagtgtaaacagagcatagctgtgtggtctgaactgtccacacacaggtgcatgggctctttattctgtgagaacaggtttgggaaagggacagggcagaagcctctattcataaaattttgtctctaatcctacaaatgttagaaatgggctggttaaggcagttgccagctgatggcttctacttgttctggacagtaacaggcaagtcctctgttcaaaatggagagacatggaggaatcagatggaagactagtaaaatgagtagataaaaatagatccctgggcagtctagagggcactgttgaaggagaaaaccacacatgttgaatgctactgtcttaggttgggctctccaagtcaaagacatacgtgcaagtagatcatctggggatgatcccaggaaacactggtgagggactagggaactgagatgggtcaggcagccaagagagggcctgctatgcagcaggtcggcactgtgggcaactgggactcagtcctgcttgagaccctgtgagctggtacagagaactcaaagttgtcccatatcaaggggcatacaggcatgtgcctcccagatatcccagtcaagggcatatttattcaccagcttccatcagtcattagctgagaggctgctccctggatgttaactctctagtccttctggcatattttgtgatcaggtagactcgggccactagttaagccttcaggcaggtggaagatggatagttctacatcacagtagtaaggcctgaggggatgtgggcagagaattgtcagtgactactccatgtaaataatattgttattatccctgtattgcagatgagaaaacaggaaaagaaagggcaaatagcttcccatagttacacagattgaaaatagcagaactggtgtaaaggaaagaaaagagaacagacaacagtggccttaaacaagggtttggaggaaccaggagacacaccctccaccaatcagcaggcagttcaaagaggggattttaaatctcttctgaatcttggtaacagaccctagccaccattgcaagggacaggaaattgtaaaacacaggaagatgagctcggaaggtccattctgcttaattgggtggattaaatgtgagaaaagacagatgttctgggccagttgaaccagaaacggaatgacagctttggaagagagtgttccacatgcagtttttctcaggatatggagagatctctctttttttgttttgaagaggattgcaggtgatgaagttgagcaaatatgagggattttaaattatttgttatgtttatttttttataccatgagccctgttttgctttcgtgtgcagctgacagttggttctaaagggccagctctacaacagcctgtctggagggctctgaaatgttacagaggactctcatgcaaggtcgtatctggctattaaatctaaccttggcttgcctaaccctggtttatgtgaggttatggtcagaactattaaaatgcagtcaaggggcgaaaatgtctgagtctcttgtgttactggtctgacttgctccacaagcttgaagagtaaacatgatgccatcacttgtaattttcactcggcccccagtcccccgctttatcatcatgaagtccaataccttcctcttgaggcttcaccctccctacccctaatcataaccatccaagaactttagagcttctcagtccaatgatcaatactattgtactgcctcttgcagccatgtgatgtcactgttgaagatgggttctgcacagtctaaaggttttaaggatgggcttttccactgtgacctgctcagcccacattagttccccatactgggtccaagatcataagccattttagtctacactcccatgctcagccattactctccaaagcaaaaccactggcccagtctgtgttgaaatcattcccttttaaccctcattgagccttgctcatcagcctggatttctggtgccttgtagcccaccctggtctacttcttggagagtaagagttggataattagtttcttttttttttttttttttttcagaaagcctcggtctccttatgcaaatgggtcctctcctccagccagatctgcacaccccttaactaagactttactttcaagggactttttgtttaaataagaaagtctgcaatgcacctgattactgaacagtcatgccattacacttggtttccttggagctcagtgaaaacatcatggctatgattactgaacagtcatgccattacacttggtttccttggagctcagtgaaaacatcatggctatgagtacaggttttagagtccgttagactcaggcttgatcccaggtctgtgatcttgggcatttacttactactgtaagcctcggtttgcccatgtgtcgaatggtatgatatgatatgatatgatatgataacatatgtcttatacaggcaataacacaaagcactttctgcagtgcctagaataagtgcaggacaaggcttattactactactatttattatcatagtaataatgataataataataaacaaatctaagaaagttgaccttatgcttctgctttcgctattgctttagacagatcacacaatccttaagtgttggaccaaggagactggccctttcagttaacattaattgcattcactgttagatacagagtaatttaaccagtttccttattctatacatttctaaactgaaagactgcttcctttcagttaatccactgtgtcttcagatccacatttgagccatggttttttctgacactgcattagacagaggattacttactactttttatccgaacatcaccttgccagctgaactgaaattcattcccatcccctctcccccaaaagaatcacactgagtttcactgtttaggcaaaagagctctgaaaactggttaaagaccatttttcccacttttgaaaatgtcagtgaatgatggtagggctagatccgtgtgagtcggtagaggtgggcctatatcagcaggtgccggagggacagccatttctccagtctcacagagcaaagtctggctgctgcagaccctggtgaaagctggatcccagttggagttacaaatgagaatggatactcttctctctgatcttggcccagcagccctgagcttcagaaacacaggaaaaacatgcaccctttttgaagggttggaataaagatttgaggaaaggaaggtgacagtttttctcctattctctctctcctcttgttttatggttcagcaccaggcgtggcagggcgggctggagtggtggtgatcaggtcaggagcaggggggaggaaagaaagcagaccaagaatatagaggcctggacctctttagtttagtgcctggtttccttcttgccttcagtttcaacctgtactttaatctccctgtgagtcgctgcctgtgacagattatgaacaatgccacccttgttccccatgagggatgtcaggtcaggatcctgatcaacattcatcatactgaagggctgagattaagaggctgtccaagttcacataccagtgaacacagatgttctatttcaaaataatggagaggctatgattcaggagctggagcaactttttaaaaatatggtcccatttcaaacaaaacaagcatttgtaatatagataataaaaagttggaaacctcctaaatgtataggatcaggaaattggttaaattactctgtacctaaaagtgaatacaatgaatgtatgaaaatggtgatatcaatctgtttctactgtcaggaagacatgttcatgatatacttttaagaaaagagcattgcatggccagatgcggtagctcatccctgtaataccagcagcattttgggaggcggaggtgggtgaatcacttgagcccaggagttcgagaccaggctgggaaacatggcgaaaccctgtctttacaaaaaatataaaaattagccaggtgtgatggtgcacacctgtaatcccagctactcgaaaagctggggctgagaatcgattgagcctgagaagttgaggctgcagtgagtcgttggtggcaccactgcatatatacaatgatatatgtatatatccagatacatatatacatatattgttagaaaagatacaacaagggctaacgcaatagttggatttgagggatgctttgttttcttttctgtttttcttgttttgtgattttatttgtttcttttgcttgactggcttttctatatatgctaatagcctgtatttatgagtagccattaagcattaggcatatagccttctatttacttctgcaagtaagtcctctaaagatgagggaacccagaaaggttaggcaacttacccagtccagcatcataaaatcgagaatccatctgagtcagcttgcctccagacccaacttcatcatcttctgtgggacaggctaggttaacccaaaggtggtgcggtgggagacttcaggccaccctgaaggcctctggatgccctaggatgactctgagcacaaacagatacggggcttaggtatgcattgctaattccaaattctataggctactaatacatgctctttcctggtcaggtttggtccagagcctgggctgggccaaacctgcaggtgaaactttctagtgcctgctcaagttggacaaattggtccaggactctcagcctactctcctgcacacagccagccccagcactgcccagcaacacctgcctgttcatttgttgacatacacattgccaaagtgtgatcaatatgtcaatattatttttttattttgctttttttctccttaattatgaatactttaattctgagcactgatacaggtattaacatgcctcagccgggcacggtggctcacgcctgtaatcccagcactttgggaggccgaggcgggtggatcacttgaggtcgggagtttgagaccagcctgcccaacatggtgaaaccttatctctactaaaaacacaaaaattagccagggatggtggtgggcacctgtaatcccagctacttgggaggctgaggcaggagaatcacttgaacccgggaggcagagtttgcagtgagctgagatcgtgccactgcaatccagcctgggtgataagagtgaactgcatctcaaaaaaaaaaaaaaaaagaaaaaaggaaatgcctctaccctgtgaaaaacttcttataacttcttcctatgcttttattttggttgtttatttttagactgataagcctagaagtttggaaatagagggcatccaggtgactattcattttccgtctgagacgaagatggcttttgtacctctccccagaggtctgaatgaggaagaatcaggcaactcaattgtatgcaagatccatcatgaagtacaattctcaaccttggctgagtgttggactcacctgggacttttaaaacctgttgatgcctgagtccactctcagagattctgatttaattggtatggggtgtagacttggcattgggggattttttaagctctccaggtgattctaatgcattgcaaagtgataattatttcctagaacctgccctacctttcctcattcccttccctcacaatccaaggagacaaaattggtttggagaaaataatttttcttattgattagcccttccctaagcgaagcagtgtggattaaggtactcagggttctcagtggcccactgagaaagcagtcctcagaggagtcccgcccattctgactctccctttccctttttattcagtatggtattgtgctggatgccgggtcttcaagaaccacagtctacgtgtatcaatggccagcagaaaaagagaataataccggagtggtcagtcaaaccttcaaatgtagtgtgaaaggtaaggactgaagtgtgtctgggagtcacaatgggcagcaaggtagagttctaagtgttttggaggcctggagaggtcctgagatgttgcttggaggcagggaatgagcattggactgggagtcaggaaataggagatcgtgtgctagtgctgctactcatcagtggaataaacttgctctagtcacttcccttctctgggcctcagtgttttatctgtatacatggaaaggggtggcgtcaagaactgtgaatggtctgagattttaccctgccatattttcatgggtgctggaagacacaagactcctgggtcagaaataaaggacaatttgttactcacaggagtagcccagagtatcagcattttcttatactggttctgattcccaatttgcccaggatgatggaaagacggacagatagtatgcactcatgcaataggttctgtcataggaaaggaaatctgggattttagggaagcatttataatgggcagtgagcatgcctgccttttgctgtggagggaaacacaagggacacatggatagctgtcttccagcagtgataaggagtagtcctgtgtattgatggcgaggcagacagagaatgacaatatgtaaacaaatggacatggctctgttccagtaaagctttatttatggacactgaaattttgaatttcatataattctcatatcatgaaatgtaattcttcctgtaaattttttcccaccattaaaaaatgtaaaaactctcttagctcacaggctgtacaaaaaaaaggtggtatactggatttggcccatggggtgccaacccctgaaatggagtattatcagcaatgataattaatgatccgccatgcagctccctgtcttttccacaacatattctgagttttatattaactgtttccttgttctttatagttttgtcttatgtatgtagtgtttctgttttttaaaacaaaattaaacatgtatttatataaatggaatcaacatattttatgccgtatttgctttgttcactaacaacattgggtttttaagattcatctgcactgatatgagtaactatcttgttcatttcctttcctttttttttttctttttttttttttgagacagagtctcactctgttgcccaggctggagtgcagtggcataatcttggctcactgcaatctctgcctcctgggttcaagcgattctcctgcctccacctcccaagtagccgggattacaggtgcctgccaccacgcctggctaatttttgtatttttagtatagatggggtttcaccatgttggccaggctggcttcgaactcctgacctcaagtgatccacctgcctcggcctcccaaagtgctgggattacaggtgtgagccaccgtgctcggcctcatttttccttgttgatgggcatttgtattttcttggttattaataaaacttaatatctttccatatatttataggcatttctgttttctgtgaaatgcatgttcatgtcttttgttcatttttctattgaattgttgaatttttcttactaattcattgaaattctttataaatattctaaatatgaattctttgccattattattatcatattattgctaataccgtctcacagtttgtagtttgtctttttagtttctttgcgatgtgtcttgatgaaaagaagttcttgattcttatgtaaatacaaccatcaatattcctttttgtggcttgctcttttgtatgttttatttaagaaatccttttctatcttgaggtcatacagacctttttctatgaaaagtgttataattttgccttttacaattaagtaattagtccaagtaattgagcctagttagggagtgtgtatatgtgtaagcctttttcaaagccacttatcttcctcgttcgagcattaggatcttcagttggcctgtagcctcccaaccagggtgttctgaatgtgcccagtgtatccttgagcccacaggacaacaggttagagactccagacctgtcctcccagcccgagcagcctcctttgtttccctccgtgagctgccaaaacattgtaagttcatggggatcatggcattgaaaaacttggaaagcagagttagtctttctcaccgggagaccaagagtcttctttggctaatcagagtgaattctgatcatctgccctccgaggagggcagccaggagcttgcctaccctgatgcacaggtgttccaggttaggctctccagaagcagatgtagagacagattatggagtgcaaggtggttattagagatgcactattatagcagaaagtgggcagagagaagtactggacaaaaaaagagaagtcaaacttcaactcaggcctgatgaagcttcagctgatccgttatgctgcactgggttgaaatggtgtaaagtggcttggctgtaataccccctgttgctgccactcttggatgtttgccaccctggaaagagcaagatcttgagcaaggcagctctctgcagctcaggcagaccctgaagaagctgacagctgggacaataagtctatttgaaggggtatattgcacggcacggttttggattcaccacataagggacttggatattttcctttaatttttttttttttttttgagatagggtctcattctgtctcccaggctggagtgcagtggcacaatcatggctcgctgcagcctagacttcctgggttcaagcagtcttcctatctcagcctcctgagtagctgggactacagacattgccaccacatctggctaattttattttttgtagagatggggtctcactatgttgcccaggctggtcttgaacttctgggctcaagccatcctcctgcctcagcctcccaaagtgctgagattacaggtgtgagccactgcacccagcggatattttctgagtattgcttgcttgttatccacaagatgcaggcagctgtagccttgctctgacctcaaccagcgatcctctatctgctcaggtaatgcctgagccatttcctcaccttcaaccatgaaatagggcagcaggctgctcctttcaaagacagagactatgtgctccaaggaaagagaagatagtgtaggatcgagattgagacttcacctcatccctactgtgtgaaccctggaaagttatctaacctgagtcttgacttcctcatctctaaagtaaaaaacataataatagttatacctaccctacaggagtgatttgaagactaaatgacataatgttgtaaaagaaatgcctggcatacagtaagtgctcaataagcattaactgttattcatggggcaccacaatcagagctcctggtggatcctcttgccacttgttactctgtcccacagttacaagatctctgtctttagacccaggagggcaattcaaccaagttagtcctgatggccttacaactgtggggaaaaataagacttacatggggaggtgttatggcagtccctcaggggaagggttccttggcccaccctggatggcatatgtgatttgaggaggcacagagtcatggaggccacagcatatccataaatggatcttcccttctttgatcacagtagcctcagggatctatatatactctgaatgaacagaagaccacaaactaaagctcaaattacagagttgaaggtcagcaagtgtcatcccctcaaaggcttgtggcttctccaaggataatttgggtttctgcttcctccattgcaaacttcccaggactcccctgtcttggccaaacagaagggggtgatgaatgcttgctcacccagcagggattcccagatgcctaggccctcagaaatttctttctggttggtatcaacccccagttgctactgttttccatgagttcattgcctttgctggcggtttctgtgctggtgtctgtacctctggctgcttgtggtgaagccacctcctggaggtgctgggttctctgcatgcgtctcatctcatctgcagtactcatgcctgctgctgcctttccccacaagggacattcataatgtctttcctttaaaccagtgactaaaaattacttaagctccactagagcctaaacttaactatctcctccattaaaatccctcaaagagttgcatcagaaaccaggccaccatagtattaaaaaaacatcctttgcctctgggtgcagtggctcatgcctgtaatcccagcactttgggaggtgaggcgggtggatcacctgaggcaaagagtttgagaccagcctggccaacatgatgaaactccatctctactaagaatacaaaaattagccgggcttggtggtgggcgcctataatcccagcttctcgggaggctgaggcaggagaattgcttgaacccagaaggcagaagttgcagtgagtggaaatcatgccactgcactccagcctgggtgacagagcgagacttcatttcaaaaaaaaaaaatcatttgccaatagttggccggagctcaagctgaggtgcgtgtctttggcttctgtttcccctcaagtaagttttgtgccgtctgtttaaccctctctccccatattgaaatagcaatttcagtgctcctctcatgggaccaagtatccaagtccaagcagcttagaagcctgtgaatcctatctccttttccctctagaaggcttaatggaccttatgcaaacaggctgtctggtgacatactcccaaggtttcaccattctatctcgcctctcaccagccgctaaccagagaccagctccttgcagattatattttgtttatcccagattggactagccaatctccttactacagagatgtatagtggtttgaaagtctcattgattgattgatttaataaatatgtattaggtgcctgctgtttgatacgaactgttcttggcaccaggaattcagaaataaacaatatatacaaaatctgtggttatgtgttatgagacttgcattccaatgaggaagatagacaaaaaaataaacgggcatataacgagtgtcaggcagacatgatgtgaagagaaatcaggcagggcaggaaaaagagagtgatcatgctgttttgaacaggattgtcagggaagtatgaagaatatgacagctaggcagagacaaaagtgatatgagacaatgggccatgtaaatgtgtgggggaagaacatgctgagcagaggcatggcaagggaaaaggccaagcatggaagctgctcagcattttccaggaaaagccaaggggccagtgtggctggaagaaagatgagaaatgagactgaagctagagccaaggcctgctccttggagggacttgaggtgtcctaagggtttgactgtgacacaaatgaagtttcttcaaagtatattgggaagccattagaagattctaactagggaactaatacgatatgacttctgtttttaacggatcactcagttgatatagaacacgtagtcaggggctaagattggaagcaaggacaccagttaagtgctgttaaatcagtacgggtgagagattaggtgatggtcaatttgcccttgactagtgcttctcaacacaaggtgaatttgtctcccgggaaacattttgcaatgtctggagatcttttcgattgtcatgactgggtccgtggtgctactagcatctagtgtatagaagacatttctcatctttcttccagccacactggccccttggcttttcctagaaaatgctgagcagcttccacacttggccttttcccttgccattctacaatgttctaagcattgtacaatgcacagaacagcctccacaacaaagaattatctaccccaaaatgtcagtagcaccaaggttaagaaaccttggtttacgatggttctggggaagggggtgagaagtgcttagatttgcgaggtattttgaaggtaggaccaacatgattttatgatggacttgatgtgaggcatctgagttcataatgcatgagcaagagtttggatatgagcaactgtgtgcatcacaacaccatttactgagattggggaacactgggagtggagcatattgggggcagggcaaagcttaaagagtttggttttgggcatattaagttggagatggctataaatcatctgagtcaggggaggcaaactttttctgtaaagagctacacgataaatattttagacttgtgggtcatatggtctctgtcgtaactgctcaactctgcccctttagcatgaaaacagccatagacaacaggtagatgaattagcatgtttgcatttcaaaaaaaaaaaactttacttgtggacactgacattttaatttcttataattttcatatgtcatgaaatgctgttcttcattttatttttttccaactacttgaaaatataaaaattattcttcacttgcaatccatacaaaaacaggtatggggtcaaatagcttgctcattcctgatctatacagtgatgtggagttgtcagataggcaagtcgggagttcgggggagggggaggatgaagaaataaagctgagtgtcatcagaatacagacgatatccagccccagctcatctaaggagtgaatagatactgaagaaaagagatctgaggacttagccttacacactccagtactgagaggttggggagaggaagaggatccagcaaaagaacttaggaggaatgacagccagtgaggggagaagaaggtcagaacccaaatccaaggtagttgaagaaagaggaagtgcgcaattaggtgaaaagtgatggggagcttataatctaagaagtcagacagacatgatatgcccccagtgcggtgatgtacactaggaaaaacctagcacacctaggaagtgctcttgccaaaaaatcaaatctgaatctgatcacatttctagaaattaactcccagtttataaaaaacacagaagacaaaggaacatgttcaaggacacctcacggatccaatcagcgaaatccaaaataagagacctactccattaaaatgatttctttaataaataaatggcaagataaaaggggggcaggaaaactgttacagaatgagaatcttaaaaaacatccaaatgcacatacaaggtatggactttggtttctgcatcacactataaagaaaaagttattctgggaaatttgaacactgacaggtctttaataatattaagaacttttttaggagtgatttttttcttaggtatcatggttatatttttcagagttcttccctcttaaaaacatatactaaagtgtttgtagatgaattaacataatgcctgggattttctttacaataattcctagagatggaaaaaagaaagcatataaatgaaaataagatgggctgtgtattgattaactgttgaagctgaatgatcagtatatggggattcatttcactagtttcacagtaaagaattaagactaatgtgagcactgacctgtgatgttcagcatagttttgttgtttttgttggctttattggcattttggagagaaaaacctgttaactaacctatctcataggaatatgcctgagagcttaatctcacattttatttactgagagaattgtgtgtctttttaaaaataactttctaattacaaaataatatattttcattgtgtgaaaatcagaaaacacaggtaaataaaatggaaccaggcacaatggtgtgcacctatattcccagctactcaggaggctaaggcagaaggatcacttgagcctaggagtttgagaccagcctgggcaacatagcaagaccccatctttatttaaaagtagaaaaggaagtaagatcatccataatccttcccaccagaggggaacatttttctttttttaggattaatatatttttatattaaaaattattcatacaggctgggtgcagtggctcactcctgtaatcccagcactttgggaggccaagtggatcagctgaagtcaggagtttgagaccagcctggccaacatggtgaaaccccatctctactaaaaatacaaaattagccgggtctgttggtgcatacctgtagtcccagctactcgggaggctgaggcaggagaatcacttgaacctgggaggcggaggctgtagtgagccgagatcatgccattgcactccagcctggacaacaagagcaaaaactccgtctaaaaaaaaaattatatatacatacgtatataaacatatatatttatttaattgttgttattgttattagtgtttcttacagctacttcagttctgaactcctgagatcaagccactgagttcatcaagcccacggcttatggtgctgtcatttgtctgttgtaggaggtcattgccccaggagggaaaattacattagaggctctgtccttggccaaggttgagaaagcctgtccttgcttctctagcactgtcgatgaaatccacgtctgtgcatcttaatggacacatccaagcaaaacttgtaattacaatgctcaggtttttttattggtttgtggtagttggaagatgggtgggaaaggttaagaaagggcagctgaaggaggcagtggctctatcaattccaaagaaggaagtttccagagggaccatattctctccatcttccttgtctgtcctatactttgtcttccttaaagtagacttatttaaactcagagcctggactgggagaacaaattaagttatgttcatgcaatggcatgcaatgcaactgtaaaaagaaatgaagaatatttatatactgctatggagtggccactaggaagtattgttgaatgcaaagaaaaaaaaagtggagaaaagtatatatagtaaattaccatttatctaaaagttggggtgattaaaaatatatatttgcttattttaaacaaacattggttaaactttttttaaaaaagaaactacttacaggaagaggagacaaggagagaatctagatgtctctgaatatacctagttttgtagatctaattttagaactacttaattattttagtaactataaaacaaaatcgttttttaaaaagtaattcctaaaactcaaaagtaaaatgcaacaggccagtcatggtgtctcacacctgtaatcccagcactttgggaggctgaagcgggtggatcacttgaggccaggagttcgagaccagcctggccaacatggcaaaactctgtctctacaaaaaatacaaaaattagccaggcacggtggcacgtgcctgtaatcccagctacttcggaggctgaggcacaagaatcgcttgaatctggcagacagaggttgtagtgagccgagatcacaccaactgcactgcagtctgggtgacacagtgagactccatctcagaaaaaaaaaaaaaaagagaaaaagatatcactatttgcaacccctaatgaaataatggagctaaaccattatcattgatgataacagcacaaaaagagaaacaaccagatactgtgcctcctattgtaagtccacactaatccctatatattttttttaaatttcaaacctgatctgatcaagcctctacattcagttaaccatttatagaaatacaagggaccaagtaagatgttaattgaactatgagggtacaatcgacaaactctagactgtggaaattcttcaggacgaagaaattgcaagtaaaatttttaataattaggagaaaaatagaaagggaaggcagaactaatagacagaaagagacttaagattgcactgtaccgaatttattgggatcctgactcatacaaatgagaagagggtgatggatgaaggaagaaggagggatgaagaggaggagtaggaagagaaagagacacagaggatgagaatgagaacgaatatggaggcaatgggaaccatgactggatagttaatgatattaagaaattatttttttggcaaggcatggtggctcatgcctgtaatcccagcactgtgggaggtcgaggcaggtggatcacctgaggtcaggagttcgagaccagcctggacaacatggtgaaaccgtgtctctataaaaaaaccaaaaattagccaggcgtggtggtgcacgcctgtaattccagctactcatgaaactgaggcaggagaatcacttgaacctgggaggtggaggttgtagtgagccgagatcgtgccactgtactccaggctgggcgacagaacaagactctgtctcagaaaaaaaaaaaaagaaaaaaagaaaagaaaaagaaattatttttaatttgtacaggtataataattcaactgtagttagggctttttcaaagaatgtttactttttgtgacacatactgaaatatgggaattaaatgacacatctgcattttgctttgtgggaagcaagtggaagattgtatggatgaaataagagtcgatcattgttgaagctgggagatagatgcatgagtttcaatatactattctctctacttttatttatatttgaaatttttataatgaaaacatttttttaaagtaggccctggcttactttttatacaattgtaattcattcttttagaggttgcaagtatactgatcagtgtgaccatacgggacttaccacatccagctgttttcgaccccctaccaaaccccaataattttcaaagccaatttgttttttatttaaaagttgtatcactgcgattggttcctggaaatgctgacagatgctgactgcttgcttttcaggctctggaatctccagctatggaaataacccccaagatgtccccagagcctttgaggagtgtatgcaaaaagtcaaggggcaggttccatcccacctccacggatccacccccattcacctgggagccacggctgggatgcgcttgctgaggtaaaggctaagtggcacaaaggagcccatttgaccaaaataaccaagaatatgttgaatcttgccaagaatgtaactctatttctgggaacaaccctcgccccccaaaaagaagcccacattctgccataaatttgggctttaaaggttgggaaacttttagtttttattttaatacccagaaagaaacagttctaaaattgtttccctctcccttggtgattttactgagaactttgaaaaagagagaggtcatatgaaatctgctcatgggatataactctagttctttgaaaagtagttgttttgacagttggcatttgacacctgtgaacaaccagctaagtttggtagtaagtacaacccatagctatgtagcttccgcttgtgtacaaaataccactgaaatctgctttaaaacaatggcatgtctgcacctcaaatcagtcaaagcttttggagttgttatgaaacaagcatctaatttcactcactcaaattagttccttctaaatttgtagtcatggcttttagcccagttgcattgtttttgaatgtcttttctcttttttctccattatagcatttccttgaccttgaaatttcaaaaaaaaattccaaaaagaaacaccaaacttaaatctactcagagtaaaggctactactccaagtgttggaataaggttttatcacaagaaaacaacactcattctgcttcagagccactttatctacgattccaagcacgcaaaattatctatgtctgagcattaataaaaaaagaacaaacagagctcctttaacatgataatgaaaagaaatcatgatgtgctctccattagactgggccttttccttatagtctcataattcttgtttctaatctgatttcctggttgaccacattgaatgtggaaggaagtcagatttctctgctcactcttggaatctgcagtgtatttccaaattatttcatttacgtgtaatagaaatgatctaaaaactccttccttttgctttttctttcttataaaaacagttcttccaaaaaggatggaactgaaaccatgtaatctcagagaacacagaaaggcagcccctttacaggctattaattccatggacctaaaatcctcatctgctatagtggatgcttccttaacacgacatgtgtggagctacttatagaaaagccagctgcaggatgtgctcatgaagttttcaatttggagactgaatgcttagagcttagtttgtgaaatccttctgctttcagtctattcaattcccattttcagactgaatttcctatttcagaatacattaggatgctgtttactctccctgggacttgacttcaggtaataagtttcagaacaggacctgagcaataccaacaatatgaatgtgataagtgactacaatcagggagaaatactggttcaattccattaaatgtctgtaaaagttactctaaaatatctttgctttaccagtagtgtttgtacatatgtaaacttcttggttgaactggctctgaacttatgacttaagtagacttctagtactctaaaaacaaaaacaaaacaaacaaacaaacaaaacagctcttaagaaactgactttttcttggttgcttcccctccctcccccagtctttcagtgagaaataattaaaaggctctgcaatttacagctcatgacaaaaaccatggaacagaaagctcacctcttaggaaaaaatgaatgtctcctttgaataaattaagtactaactctttcttgtaaaactgttttctaatgatgatctatttcttctgagaaactagctgatattttaattactagacaagtaaaatagaaaagaaaacaattaatgagaattagctgggatgagaattgatgaaactgggaaaactctgaattattttccaagaagtgataattggccacggaattggaatggatcctgcttatagccttgctctttcttcttcctgagccaagagtcagccagtgcccctggctttctacccatggatgaaagatgaaataatctcccaagtgagctttctttcatagggtaaaatggcagcagatggacgccataacattctgtcaccagggatagaatgctgtgttgccactcctctaagagtcagcacaccaatggtttttcaatccagtgacagccatgatgactgtcatatcccttcatgctgaagccctcccaaagagtgaagcaaaaacagctaaaaactcaatgttcttcctttcccccttcctactaagctccctttccgtctggtcagatgagggttccttcatatggtgcctccaagagattatttatgccactcttatgacttcatcaatcccctttcctctgctgatctaagacagagcaatggcagttaaataggaggctcttttgatacatgaacagatgagatgggtggggagaacaaattgtacttatgctgaaagcaattttcctgcttggcagtttgacaggtaacaagtgcatcctgccttcacagttgccccagaaggcttcaacttgcaaaagggattgtggtgtacagcacacatctggaaaatcattcatccccaccagcagggagacggtgaagtttgcattttcacctgagtgagactatgtattttaagactgtattgtctgggcactcagacttgtttgttctgtgccttgtacaggttgcaaaatgaaacagcagctaatgaagtccttgaaagcatccaaagctacttcaagtcccagccctttgactttaggggtgctcaaatcatttctgggcaagaagaaggggtatatggatggattacagccaactatttaatgggaaatttcctggaggtgtgtgcaaacaaatgcatggtttttaatcttactgtttatcctatcccctgtgagtgatagcctaagtagaggtacatgccatcagggatatctgccctgtatcactcctaccatgtaacgcattagggaaatacctatgagacaatagctaagaaagacatatatagctggggagaaaacatggtcataaacaggactaaatgctagggagggagggaatcttgtcactttactagcttgtaagaaattgaagggggtgggatctaaatttaacactaggctatgggtctttgggagggcagttgaagaataacccttcagagaggctccatgaccatctgaaatgtacaaagccctcaggaagtctgtatccctaagtccccagagacaggaggaggtcttcactctgtgttcccaggtctcctcacagtccaatccctgcactccctgctcccttggtgcagaggaaagttgactccaagagacaactgccatgttacagggggcacaaaacaggagttactcagagcatatccagcccaagacctattttgttcaccttcaaatgtattttaaatttttaaataattaccaacaattaacatttgggaaatttcacataaaaatccatacttctagcttcttctgacctcctcactcctcccaaaaatcggaggaactggtcacagtagactcacattcctgcacggtaacaggaacagagtgtaaatcatggactctccagtttgccacagacccaccagtccctattatacacctaatctacttcactcatttattacttacctatgttacctgcccagttcctgtaagcattttaattcaccacctctaaaagaaaaggaaagaattggcctcacatgctccctctgtcctacttcttagtaataggagacgaggcttgggtggagaactctgggcaaacagagatggtgcctttggctttctttctcacttccttttcccactgtgcagaagaacctgtggcacatgtgggtgcacccgcatggagtggaaaccacgggtgccctggacttaggtggtgcctccacccaaatatccttcgtggcaggagagaagatggatctgaacaccagcgacatcatgcaggtgtccctgtatggctacgtatacacgctctacacacacagcttccagtgctatggccggaatgaggctgagaagaagtttctggcaatgctcctgcaggtacttgagtcgggggtagggggtggcaggtgttctcttgagggtttgagctgaggggagaatgccctgccttctggggtctgtcctctccacttcaattgaaaggtagatggaaataacagcattttccaatttactcctgggggtccaagtccctttcctctctgtctctttcttcccctccgtctccctctcatgttgcccacttccagtaaatttgagtaagaagtctagggaagttccagagcttcagttgttttgtaaatgactcaagacctggaatccctttatggacacaaactgttttaaaccaggagctaaataagcctgagaattttgagactcccctgggtgtagacaaaataatattagtggtcacaagagaaatgtgtgctgaagggggagagggcagagcccttcccaggctcagcctccttttagatgggtctatattaggcagacttgatacccttatatggcagaactttagagcaaccacattccatcatgttgatcagtaattcatttgataagtgttccagggcccagaaggctaattcaggcatcagctagaaagctattgctaatattaaactcaacattatgcagtgtgtgttcatgagggcactaactccacaggtgagaccccagacccaaacaccagtgctcaggggacatcaatcttagccatggctgggtggctgagaggatgggccttgactgcctagaggggtatgaggaaatcagaagccacagatcctggcttcttatgggactcaaaggcaggggaatcagcctatgaacaaaatggacacaacttcagtaggttaacccacgttcgtccaacctactctgataactgaagacaggaacagactctatcctgcagaggagttgaagggatcacaaaagtgcatcttcagcaggactcacaacttcagacccctgcatttacccagtgttcatgcagggtaggttgtgggaactcagcttccagttctggcccctcccccaaacatctccccaatcctcccagaaatggctgaggccccaggacacatgcatgggacatttattgtcaggagagtctgagcactgcctggaaaggacagatgtgagaaccctgcagacagccctcaactacccttctgtagtaatccatgctcacactactataaagaaatacctgaaactgggtaatttataaagaaaagaggtttgtttaattggttcatggttctgtgagctgtacaggtttctgcttctagggaggcttcaggaaacttaaaatcatagtagaaggcgaagcggaagcaagcccttcttacatgggggaataggaggaagagagagagtgaagcggaaggtgccatacaattttaaacaaccagatctcctgacaactcactcactatcatgagaacagcaagggggaaatccacccccatgccccaatcacctcccaccaggcccctcctccaacactgggattacaattttacatgagacaaagccaaaccatgtcaccttccatggctcccatcccaacttccacctccctgcccagtcagccaaaccaaaccctacaggtaactcaatcaaccctccctatcaggggatctcaatactcaccactcatccccacttgctcatcaaagtagttcaaccaacatgcttctttctttctgggagagaagctctggaaaatcctcttttctccagctccttttacctctagcaatgcctaatgtcctttgctccagctctgaccctagcaggggtagaatgtggaggctcaggtgaaatcctcctttttccagggtgagtgaggatcagagaggctaatcttttaaatttggctggccctatggaatgtgtgtgtttctgtctgtctgcgtgcctctgtgtgtttttgtactcatacaatgtttactaaagaatgattatctatgtatccagcagtccacagagaagaagtaaatacttcacctttctgaggtctgatttaggcttgagaatgccagtctccaaatgtgagcccagcactggccatggagaagtgagcacccagcctctcacagtcagctcacagggacagggacacatgtcttcaatttgcatggtaacctctagatgcctgatagggtggctctgccctcagaggcttctgactcatgcaagaggagagacccagatgagatgaggattactgacaaattcatgtcaagactcacctgaccaacagtttcataggtcaaatatgtattgccaagccctgacttggaaggttcacacaaattattgcattgtaaacactgactgagtaaattccatcagtctggatcttgtttcctcatctgtaatataaggaactacgtagtgtggtgagaatgatagctggatatgtactttgcaagttactttcttatcaataagtctccagtcaccttagagctgaagtctcactctgacaacatgttagatattaggaatgtgcattcactttctatctttccctttttaagtaagaaatttttcttctgtttttaatgtaatatatgttcagtgaaaaacatttaggagatgcacaccaaaaactataaaggatttatttaaaaacagaattaaccactattaacatactattgcattttcttccattttttaaatgtatgaatgtgtaaaaacttggcttcatatggtatatataattttatatttaccttttattttacctaaccatatattatgatcattttcctgtgttgttaatgtccttttaaaatacgattttttatgagagcataatattccaagtgccataacttaaaaagaaaaaaaattgaccattcgattatgaaagaaagtacattcttattgtaaaaatttaaaaccatagaaagagtgttaaagtcaaaatgaaagatcctccttccaatcccatttactgaatgccatcactggtcaaagcttaatatgttgttcttctacactttccaggtcagtatattaacttattttctttactatttactatcccataatttatcaatcataccctccctcatggacatcaggctatgtcctgttttgttgctacaacaataatataataagccttcttactcatataatcttagcgattttatttctgtaggacaggttcaaaggacaggtgtatttttttatttaaatgaacaaataggtaatcttccaacaaaattagaaccattcagattaccacccatgttgtgatgactttttgaaataagcttcaggaattccaaaacattctaataataagtacttagataatgaggatctgtttctggattttctgttctatacattcatttttctattttggggccaatatcatgttgttctacttgcaaaagtctatttttctactctcagaggtttattttgaacttcaaagtcatttgaagcagtaacaaaaaaggaagttttttgttgagattgtgattgcaatcacattgattcatatattaatttggttaaaatgtgcttattagtgacatcaacaatttctatccagaattatacaatgtatttccatttatttaattcttggcttgtatccttcaataaaatgtatagttttcatcattggttctgtacctctgttgttaaatgtattttctttgtgtatattttttaagctttctatcactatcaagaatagtttctatcattgttttttccagttttaaccagttttactctaagatcagattatgctgtagttttctagtggacttttctccctcgagcccattgactgactttttcatgacagtgccctgcaaacactaagctcggtgaagactgttgaatgttgaatgcctgaacttggcacattggcaaattatacttaaagaatgccataacaaaaattcaaacacacaaaaaaagaaaagaactaatacttactaagcttttcctatgtactaagtcagaaataatttatgttatcttgtttcttctctgggccaagccagaaataatttatagttttaatcattttaaaagtataaatctcccttcagactatactagaaaagaaaaaaagtacaaatcagatttggaagtagatactaaatagccaattgattagtttgatttttttttcttttttctttttttctttttttttttggagatggagtcttgctctgtcacccaggctggagtgcagtggtgtgatcttggctcactgcaagctctgcctctcgggttcacgccattctcctacctcagcctcccgagtagctgggactacaggtgcccgccaccatgcccagctaattttttctatttttttttagtagagatggggtttcactgtgttagccaggatggcctcgatctcctgacctcgtgatccgcccgccttggcctcccaaagtgctggaattacacgtgtgagccaccacgccccgcatattttttctttcaaccaatatttcagccatagggtgacccaagtatgatatgctatagattatatgtaacaatttttgaaaatcatagatttttttcataccatagaggcagaaaggggcctgtttgcctccttctcagtcatatgaagatttttctggaaaacactcatttgggttatatttgatgaatattaagcttttataggatttttgcagaatcttgtcactgacctttgttaaataattgcattacttgaatatgtacctcagtttcctcatcagtaaaatgaaagggttgggctaaatgtctgagtcaagattttactgtagggtggccaggtgcagtggctcacacctgtaatcctagcactttgggaggctaaggcaggagaatctcttgtgcccaggagtttgagaccaacctgggtaacacagggagaccccacctctacaaaacaaaaaataataataattaattaatttaaattttttttttttttttgagacggagtcttgctttgtcacccaggctggagtgtaatggtgcaatctcggtttgctgcaacctccgcctcccgggttcaagtggttctcctgcctcagcctcctgagtagctgggactacaggtgcgtgccaccacgcctggctaatttttgtatttttaggaaagacggggtttcaccatgttgcccaggctggtctcaaactcctgacctcaaatgatctgcctgcctcagcctcctaaagtgctgggattacagatgtgagccatcacacccagccaaaagaaaagattttactgtaggggaagcagtatgccttagtggcttaagttgaacatagttcaaatccaattccttagaaaagagagttcataaattgaatcaacaacattcaggactttagcataaaatagagtattttgcaccagtagattaaagattgaatagtcatatggaaaaagtaaagccaagtctctgagtctttaaatcaaataaatttcaatggataaaagatttatatgtgacaaggatatttgtttgtaatggcaaaatgattgggaaccacctcaatgttcatctagatgatattccttaaataaagtatggtttatttgtacagtggaatactatgcagctactaaaaaaataggccactgtataagtacaatgaatggaaagatctcaaagatatataattttaagtgagaaaagcaacgggtagaatggggtatataaagtgctaccatttatggctttaaaaaaagaaaagcatgggagaaaatatatatatttgcatgtgcatgccagatctttggaaggatacacaaaaactggcaatagtgattgtttccagaaaaaggcctgatggctgcaagtggatgagaaggagacttcactttcatatgtttatttgtaccttttggattattttgctagatggatgggtgatattctacttaaaatgatacattatatatatccattttctcaccaagtgaagttcataaaacctggttcatagggctatcataagagctggatcagataatgtgagagagagcctagcgctatgcctggtacgaggtaattgtcacacacacacacacacacacacacccttttcccacccctacttgaattatctagacaacctgtgatcaaagacatgctgacacagaatggtattttttgtttctctcttggcattggagggtagtgatagaatttgcaaaagggaaatacttggctctccacaaaaaaagtggtttctaataccttactcttttttttttttttttacttagagattttattattattattattattatactttaagttttagggtacatgtgcacaatgtgcaggttagttacatatgtatacatgtaccatgctggtgtgctgcacccattaactcgtcatttagcattaggtatatctcctaatgctatccttcccccctccccccaccccacaacagtccccagagtgtgatgttccccttcctgtgtccatgtgttctcattgttcaattcccatctatgagtgagaacatgtggtgtttggttttttgtccttgcgatagtttactgagaatgatgattttcaatttcatccatgtccctacaaaggacatgaactcatcatgttttatggcttcatagtattccatggtgtatatgtgccatattttcttaatccagtctatcactattggacatttgggttgattccaagtctttgctattgtgaatagtgccgcaataaacatacgtgtctaacaccttactcttatacctacagaattctcctaccaaaaaccatctcaccaatccctgttaccctcgggattatagcatcagcttcaccatgggccatgtatttgatagcctgtgcactgtggaccagaggccagaaagttataaccccaatgatgtcatcacttttgaaggaactggggacccatctctgtgtaaggagaaggtggcttccatatttgacttcaaagcttgccatgatcaagaaacctgttcttttgatggggtttatcagccaaagattaaagggccatttgtggtaagagcaaaaccttctgaaagattcctttccccattgaatattcatttctcacttttctgtttctcctctgctgacttgttagccaccttcttattcctcacccataaacctttctattataccccattctgagaactaattttcttctgtattacttatttccaggcttttgcaggattctactacacagccagtgctttaaatctttcaggtagcttttccctggacaccttcaactccagcacctggaatttctgctcacagaattggagtcaggtcagtatttaaagagaagggatcaatgtcagtacaaaaaaatatggtagaatctattctatgtgtgtgtattctgaatttagcctttatgctcttctatttccatcacatctgtaaaataaaaggaataagggaatctactcccacacctgtggtgtgaattaatgttataactacatgcacaatggttagaacaatatttggcatataataagcactcaatgagtttaaagattagtatattgtgatattatatagggatattttcataattatattgtgtgattatatgattgtattataaagtattttctattatgaaattatgggtgataagattctttaaaacatgacttttaacccaaggtgttcattttaaaacatacctgcctgccctgcctctcagatgttttaaacctttcagctcccactgctgctccccaaatttgatgaggtatatgcccgctcttactgcttctcagccaactacatctaccacttgtttgtgaacggttacaaattcacagaggagacttggccccaaatacactttgaaaaagaagtaagttaagcacaaatcattttctcttcttcttcccaacagagaggtttgtatgtgtgtgtggaacaaatgtagaaggtaaaagggtattaatgagttaaactcactgggtggaagctgatcagactgatcccttgtgagtttcccagaagaggtcatggagaatttagaagagttgctcatgggtatacattctcctggaaaagactggaagccaagggccaatggactaggcggtcctggagggcagagacctgtcttggtatcttcatattcccagcactctgcacaaggaatagagcctagaaggtacttagtaaatgttggttgaattcataaataaatatgttaaggatatgagacttttcatcctgaaaagaagctttaaatgtaacagttttttaaagaggatagtaactaattcttctccattttattcagatatcagagtaagatacaggccttagggcctgatggatttgcattagcattaaataaatattttctctttgaatgaacctgaagtcattatatttactgacaaagatttgggggatggggaagatattcttagctcagggtttaatatatttaaaaatatgtatatttatagatatctataaatacatacatatatatatatgatggtcaagtgaccagaatggtccaaagctggaatcacagctgtcacctggtgacaggtgaaaggacctccataccttgtttttaggcagggctaagccttgtgaatatgttcagccagcactatgttccccaggttccagagaattttctcatttcaggaatagctgatatgaagcctgaaggatgtctggagtcagcctgttcaataccagcttcagcaataattagattaaaccaatcaatatcctgcattaggcctctgactatctacttttacataaataaaattgagtcatctacaaaaaaataaggatgtctggagacataaggactgttggtagcatgtactctctaagctttgcttctaataaatctaattaccagtaaagtatattataagaatggagaatgactttccatttgaatgccagtttgagttgacataatattctaagttaaaagttccctttttttaattataaagaattttgtgtccagccaaattagtatttaaatgtgaagatgtaggctgggcacggtggctcacacctgtaatcccagcgctttgggaggccgaggcaggcggatcacctgaggtcaggagtttgagaccagcctgaccaacatggagaaaccctgtctctactaaaaatacgaaattagctgggcatgttggtgcatgcctgtaatcccagctactcagaggctgaggcaggagaatcacttgcacctgggaggtgaaggttgccgtgagccgagatcacgccattgcactccagcctgggcaacaacagcaaaactccatctcaaaaaataaaaataaaaataaataaataaaaatgtgaaggtgtaaaaagacttgagaagatttgctgcacagaagacttacaatgaaaatatttttggtggaagtaataaaataagaagagaaataaatccaggagatgttacaaaaacactggaagtaagaataaatgatgttgtggcttaaaatttacattaaaaaagccgggtgctgtggctcatgcctgtaattccagcactttgggaggccgaggcaggtgaatcatttgaggtcaggagttcgagaccagcctggccaacatggcaaaaccatgtctctactaaacatacaaaaaattagctgggtatggtggcatgtgcctgtactcccagccactcaggaggctgaggcaggagaattgcttgaaactgggaggtggaggttgcagtgagccgagatctcaccatttcactttagcctgggcgaaagagcaagactctgtctcaaaaaaaaaaaaaaaattatattaaaaaaaacagaaaacgaacactaaagaaaagtatttaaaaaaaactccattcatatgactcaagtatagaaaatatccacatgataagggtgtggtaaggagttataagatacagggacataagagtaacctaaaattctcttcttgtcaaaggaaacacagagatatctttttctttttcttttctttttttttttttttttttgagacggagtctcgctctgtcgcctaggctggagtgcaatggtgtgatcttggctcactgcagcctccgcctcctgggctcaaacaattctcctgcctcagcctcctgagtagctgggattacaggcacccaccatcatgcctggctaatttttgtatttttgtagagacagggtttcaccatgttggccaggctggtcttgaactcctgacctcaggtgatcccgcctcggcctcccaaagtgctgggattataggcgtgagccaccatgactggccacagatatcatttttaaggcaggaaagaagaaaaaatatatatagaaaaatagcactaattgaaaatttaaaagtaagatattagaaagaagtgtaaatatattaataatcacaataattataaatggactaaacctaccagttaaaagagagatgtcaaattgaatttttagaaatcaagcaggtgccatttataagagaaacatggttcaagcataaagacatggaaagatagaaagataattttgttaaattatcaaacactacccaaaagaaagctggtataactatttagtatctggcaaagcagtctttaagaccaagagcctcattctagacacagagggttacaacataatgataaaatgttcaattcactatgaagattgcaaaggtgaaacatttatacacctaataaaacaccctaaaaacatgtaaagcaaaaatagatagaactaccagaataaattgacagtcagcttcccatttgggctgattttctattcttaggaactggtcctgggatcagtaaaccactcattagcctctttctctagccacaaacactcctgtgctcctggacaacaggaacactttcactgttattaactgtgccgtcttcactcttggctgtgacaagattgtgagaatttgttcttttgactatttcttctgcagcgctggaggtgagatttccccaagcctttgtggctacagtgtggtgtcttaacttgggcaagtcctttgacctctttgggccacaatttcccatgggagctttgtgaggttgatagcagtatgactccggtatgtgattgcagccttgagccttgccctgagcgctgagccatctcctctactccacaggtggggaatagcagcatagcctggtctcttggctacatgctcagcctgaccaaccagatcccagctgaaagccctctgatccgtctgcccatagaaccacctgtctttgtgggcaccctcgctttcttcacagcggcagccttgctgtgtctggcatttcttgcatacctgtgttcagcaaccagaagaaagaggcactccgagcatgcctttgaccatgcagtggattctgactgagccttcaaagcagctcctggagtccaatggctgcttagagtcagcctgggtggcaccaggcaatgcaggtgaagtggctgccttcaggaaatacaactaactaaaatcaaacacctaggtcacgtgcctctcaaatactgatttctgccacagcacctcttgaggcatcccttggctattctgtgcatattgttcttcagagacctcactacccacatgctgatctattggggaacagagaagagacaggccacgaaggtcaggctctttatattaagttccccagaggaagagtaagttgagaaggtatcagtttaatgttgaagaattgacctcagggctcagtttccatttccctccctcagtattcttcctggcaagatacccattaagcatttcgccaatcagaatctcattttatagtttttcccattggtctttaactaagactttcttgtagcaatctcgtaagcagtgaaccccctcagatcagtagaatatagtatctgggggagaagacttacttccttcagggcagcagccacagccaggcttctgtcatacaggtagatcccgaagcacagagacataaaaaaggtctcccagaaaactatagaccattctccaagtggaattcccacttagggctctggtcactagattgcaacctgtgtgtttgtcatcatcctcatctcaccattgtattgctatgccctcccataaaaacacattgatccctagcaagattattgcattccagattttactgcctttgctaggcttttgcttagcaaagggctgactttccattgttatcatggtgtatatatttttgtcaccattcccacaagtatacttgatgttgtcatagaacgaacatcctactctatgatttactaaccaattactttcccagatcatagacctctctgcatagtagtcataggtcttgactttggggaaagaaaaggaagctgcaggaatatttatctccaaagtcgaatgagaaagaactccagcaaatccaatggctacaaactaaaaatcagcattatttcatattgctgtttcttagctgaatatggaataaagaactattattttattttga

SEQ ID NO: 4 - DNA, 2743 bp, Homo sapiens
atagtctccatcggccattttgtgcgagaagccgcagcgccgcctcttctctcgcgccctcgcctcttcctccgcctcctccttcgcctcttcctgcctcctcccggcttccgccgccgccactccagcctaatcccaaccccagggcgaagcgttttcttatttatttccgttttctcgccactacagcctcctgacaaggtgatccgggcgggccccgcaggaattttatcccctcaccggcctcacactagtatcgcatgtccactatccagaacctccaatctttcggtaagatcccgtcgccgccgcctccctcccttgcccggcgcgcatctcggccttttgcccgcctggccaccgcccctaggggccccctttctgcccttcccgcacccctagtggggctttgtctcggcgcccagaaaatggcgacggggcccctggcgaccccttccccgaggacagcgccggactccgagccctcctctcggagccccggccgcgggccctgcgccaccccctgccccgtccttgacccggctctcgcctccgcttctgccccttgaaaccttggcgatcctatttcgtggactcctagatcggccctgctacttgcaaagggtatgccgggccagggaaaccagggatcggcgcccgttctctggcagctcctgggggcacttagggaaagatgcggatgcaagcctctgatctgtcactggccagtggttcagtcttctctgcttgcgtagcaatttgttaaattacgcctcttgatatatatgtaatctactttttttttggcaaggcacagttacggttaaatgattaaggtgggcgtattcgaatgtttatgttttcatcagaatgtaatcgagatgacgcacatttttatagcggctacaatattaaggttttctaaatctttttctcattagaggaccatattgaacgataacattatttatctataacagcgtttttctacaatggacatagctgttcaaatgtttctctttttgtgagagtatcttgggggttttattaatactccacccccatctccattcctaccggcaaaaacagcaaaggcactagaaccttcattgatgactgtctggattggtagtataatgtatttctggaaagtacttcttaaaaaatatttttctactttggattttttttttttttttatccattcgcagacccctttgctgatgcaactaagggtgacgacttactcccggcagggactgaggattacattcatataagaatccagcaacggaacggcagaaagacactgactactgttcagggcattgcagatgattatgacaaaaagaaacttgtgaaagctttcaaaaaggtaaagggattaggaagaaaggattagagttactgatgcacacctctgaactggattatgattcacacctttatatcggcgtggatgaaaataactagaccaagaaagttgttctcatttttgtaattaacatgtaaatatttagttattctcccagtgtggtctctcattttaaaagaagattcgcgttgcttttaaataaatttaaatgtgaaatatttagttcttgatgttacacataaaatcatttcctggtttacaaattaatttggaaggattgtggattataggagacaaaatctgtttctctaaatatgatctagcttactgaaatggctaattctgttcatacggtgaaataaaacctcatagtagttgactaaattttgttgtatatttatgcacttttccagaaatttgcctgtaatggtactgtgattgaacatcctgaatacggagaggttattcagcttcaaggtgaccaaagaaaaaacatctgccagtttctcttggaggtgagtgattgggtgctttatgtgtaaccttgagattgcttttaaaattgtatttaaaggcaacatgatttgttttctactaagtaaaaaatcatacgaatgaaggaaattaggtgaaataaagacatggtagttatttggaaagcaaagacctttatctggtttattttgtcattagagtattctgatcatttctttatatacacacacaggctatttcttggcatgtaaagtattcaaatacgtgttgaattgttggctatcagcagtgcatgccacagacaacagtgttgcagtaagctgttgatagtgattctttttaattactcttccatgttttcttaatgaatttttatatttctcagagttattttgctaaattagattttattttacaggttggcattgtaaaggaggaacagcttaaggttcatggattctaaaatgaacctaaatacgtggagaatttcttgaatagttttgttctctaaacccggtttggctgccttgtgaaatgattccctgcagtaaacggacttttcatttatttaatcattcaaacttccattcacatctgcatgattacagaaaacatggggtatgtagactagtaacacataagaaaattgcagtaagatggtaacaaaacctcatattgtctttacatgtttccaatggaaaatgttttgagtgtttattgttcagtttattacgtttcacttgattaaatttttttgttgttgtattaaaccatgtacgttgcagcttaacaataaaaaaaaatctatgaatctttgtgagcaattatgctcccaaatctaagcaagtaaaatacacattttgtctttcttaa

SEQ ID NO: 5 - DNA, 342320 bp, Homo sapiens
atgtttgttctcttcttgtgcaacctttccttggtaccagcggctgcttcaaagaataaagttaaaggtgagctcctgtttattctgcatgagtcatcatcattcatttttctgctcaatcttctaagttctcttaaatgatagaaccaattcggttggtgataatactatttcagtgtatagatattgttcataaattcctacaaatacaaatatcaattatttcagttatccaatttctgagacatgtttgcatgaatgtttgtgagtttgttttcttgtttcacttctcactttattcctaagtatttcaaagtgcaataaagtgctttttttgcactaacattttgcatgcgtaccttagtttccttgataaaattgagaattgggcaaaatacagcataaaataaaactgatggaaagtctcaaaaatgagtatgcttttatagaattatgtgaaaataaaatttaatcttctaaaaactgaatattataagctatcgatttctatttatgattattttttcatttttagttgcattgtttgactttgctagaaacctaaaaatgtgttttcatgataaaagatgcacatgtccaacgctgaaaataaagaaaaagtattttggctccatgtgtcccagtttttatgggtttgaaaaattcaaatacatgtatgatactgtatcatagacctatcatttatgtatttcaatttcattctgtttagagcagtctacatatttaaaaatcttttttgcttttgcttcttaaatagcaaaagaaatttttttctctttcagttccaggttctagttttacagctagttttaatactatgacatacgctcatctttgaagtgttaactattccctatttataaagtcaagcctttatcatacaactaatattgtcatagcaatgtatttgcttatagaatatgaaatatttaaaggaggagatggcaaatttattgtcacctttcttatagctcacctagccttgtttcctgttccagtaagtgttgtggaaaatcagccaatccttgccacagtaattttctgtctggctgtgaacaaaataaatacattcacagcaattcagaaattatttgataatgaatacatgtctataaatgtataagcacaatatgtttatataatgaaaggatgagaagtgtagttttaggaatgaggaattacaaactatacacactgcaccagctccagggtacagcatatgagtgtaaagggaaccagggggagatgcatatcagcactggaatcatcagagaccactttatgtaggaggtggagctggaagtggctcttgaaggatggataggatgtacatagaaaacaagtagtgtatttaaaaaaataattagaaaggctaactaaaggtctggaaacaggagtgaatacagtctagtgtggtgagaaaatcttttgaatgaaacctggtacttttataagaaagtgtagaaaaataaattctaagatgatgcaatagacaatggagtgattatgagtcattacagtatttgatcacataaaacctctagtaatcaattactctccaaaacaatggaaaataatttgaattataatacgcaggctgctaagtattaaatatggaaaagccatttcatcattggagaattatagtcataaattatattacaggtatctgtcaagtcatttcaggactcaagctgactagaattttataatgcaagcatatttctgtatccaatttagtgccttccacacttccatccccagtgttccacacttagccattttatttgactctcctctttttacttgtatactagcctgtaggggccttaacacatagctttccgcatgcttatatttttgcatctacaaggcaagcaatgacacgttcaaaaattaattgtgcctcaagtggaaactgaaattttatttctaaccattgctgaagaaagatatatattatgtagagataatagaaagaattactcagtgattttttggtccaatttctatatgaaggcaaatggtcttcaaacagaaaaaaaaaagtggataagaggaaaataaaacccaagataatataagagcagatggttgcttcagaatagttcatttctcctggcccagaaaaagtacttaccagggaaccgagagaaattttaaagaagattatatctcatttatctatccttatggaatcacgcaaatgtggaaagtttctggaatattggagagaggaatgtgttctgattttttgtaaggagtaatgatttcatttccagaaaccataaactggtcattttgacatcaatttcccagtaagatttttaaacactcttaaaacaacagttggtgggtatttaggttaaaacagagttcattgagaatcagtcagaaattattagtaatagcataggaaattacaccttctttttttaaatgtgagttactataccagtataggagggcagtagcatagacataatatacctgaattttatcaaataatgtagcaactagctctttgcttatttctgtagaaacttattctgaagatcactaattattctccaatggccaaatccaagggtggtttctcaatcctcatattgctatttttttcctgatgaacatattatattcttttgaatttacatttcctttggtttcagtggcactgtacatacttcattttttaaaacttctctttgcctctttctttctctctccatttatatcttgttctgaaatacaggttttattcaggttgtctttgattcttgaaaagatcaactattgtagtgtaggttcagctttccacactgcctttgagagataaacttcacttcctacaaaataaagaatggggccattttctagacaattgtgtacctgcaaccaacctgtctcactattgttgcctgtcaagaggaacataaatgacccagtcgagttgcttctcagaaaacttataactgggaaagggctagagagagagagagggaaaagtcaaggaggtaagacaaagaaacagagatggttgatcagttctgttactcttcacgcgtaaattttgtatgtagatttaataaaatgaattaaggttgacaaatgccacaagaaggaaggaggactctatgaagagtgagagattgagagagtactctgctggtgcactagcttcttggtctaacgtattgctaaggctctattttatctttactctctgggtctatgacacagatgtcttttaataaaaatttctagataggtttctcttgcttagaatcaaaagagaaataatatgaatgttttctttctaagggttttttcattgactttgttacacttttctgaacttgacttaactgttaagcttttgtctgatattttcatcaccctgctgaatatttccactttaatattagaaaccgatattcttatttatttacttattttgtaactaagaaccctctgggtttgctatatgttctcatgacatgaatattagtccaattttctaagtttaaaagatttgaaatacctttaacttctctttcttaatggccctctcatccaattaattatcaaattgtcctaattttatccctatagtgtcttttgcatgaatccttattctttgaatctctcattcctggccgggtgcagtggctcatgcctgtaatcccagcactttgggaggtcaaggcaggtggatcacttgaggtcaggaatttgagatcagcctggccaacatggtgaaaccccatctctactaaaaatacaaaaaataggcaggtgtggtgatggtcccctgtaatcccagctactcaggaggctgaggcaggagaatctcttgacccagggaggcggagcctgcagtgagctgagattctgccactgcactccagcctgggtaacagaggcagactctgtctaaataaaataaaataaaataaaataaaataaaataaaatataaaaaatctcattcttcagagcttgcctgaaatagtttctaacttgtctcctgattcaattctcaacatgctacatttgatatacaagtctatcctacatttgtatatcatgctgaattttaacaagatcatcactgctttgccacttagaggagaaaggtactttaaagtagtcttaaaatttctttgtataaaataattttatttcactctgttatgcatgtataaaaataggctaaatgtatcttaatgactgctccaaaatgttacaattttttaaatagctttaacccagaaaaaatatttttagtctttaatcctgatttgggggctttatttttaagcaaaatttggcaactatagttctatgctatttctagaatgccagcttttagatattattttcaaagcgaatgtcttaaatctcaacaatcatgtaatcattattcagtgctcaaataaaaattaacataattattctgactttgcttaagaattaagataatgcagagcccttagctatctaaattgagatatatatggttcaaaggagaatcagtatttcaatttgctgagtttgttaagtaatagtcatacataatattatcacataaatgatttattcataggagaatattataaatctgctataaagccaaaatatgacatttggaatcccaggctacccatcatatgaaaaattttggaggttaattgaaaggcatgtaagaggctgaagttgagacattgcttcaaactattttgagatttttatcttaagtcaggtgcctatattttaatttgtatcatgtagtatttcttatatattaagacttacattttgtagtcagacaggaatatgttgaatctttgttttgcaactcgctagatttgagcacctggacaaattttcattaaagttcacacaacattcagttgtgacaattttattggataaagcacacaaaaaaggattgacatagggaatggaacacagtgagcacttagtaaattgtacctattattattattactatcacaatttaaattatatctgtgggaaaaatgaacaaacacaaaaacatgtagtcctaggtaagtcccaaaactaaaacttttctgtaagtttcactatatttcctcttcataatggcattcatatgtttatattcattataagactaaaataaacacatacagtataagatgtgaatgatccactaggtatatgtttttctttcatcacctttaatattaaaaaacaaagtacataaatgatattattaaataatttcaaccacaagtgaaataaaaaatttgagaaaattatgacaaagagaggcttatataatacttaaaatgtaaaaatatcctgcttttattatcagtgaagaaattaagtaatgaggccataatatattttttttgaaaatatcacttaactacttttttaaagctatttttagattgtaattttaaaagtgggccgggtgtgatggctcacacctgtgatcccagcagttttggaggccaaggcaagtggatcacttgaggtcatgagatcaagaccaggctggccaacatggtgaaaacccatctctactaagaataccaaaaaaaaaaaaaaaaaaaaattgctgagcgtggcacacgcctgtaatcccagctacttcagaggctgaggcaggagaatcacttgaacctgggaggcggagtttgcagtgaaccgaaatcacaccattgcactccagcctgggcgacagagggagactctgtctcaaaaaaaaaagaaaaaaagtgtaagacacaattcaaattcttgcataacagctacaaaatcttcataaaaaacgaatcaggagtcaattattgaagtttatgcttattctacacaagactgatctaaggaaatatgtgtcaggggcgttagacatatagaagggaatttaaaagcatattgtatttctgtaacacatatttcatttagggattcaggtggaagaccccgagctagtacctttaggaagattgccttctaaatctaccttctagttcacctcacttctctaagaaaattgctgaagacactgctatataatagtgcaataatgtttattaagatatattactgcagcttttttctaacttttaaaaaagtaagtaacaatgataattataacagctaatatttcttaaatgttaccatgtgtgagacattgtgctaagcattcgtaggtgttttctctttcaatccatacaaaaccctctgagataggtaccattttatcgtcattttcaaaatgtggaaaatgaagcagagttaagaaatttaagttcacaaaatgagtaagaggcagggcaaaaattctaagccagacatattaactcctgaattcaagcttttaatctattaaatcctctaaagagatcagattaatcaatattacaacttacctgaatctcattcatttaaatgcatttacatatataccacccacccagatgggagtagggttgggagtagggataatatagcctgatgagtagctagcaagaatatattggaccagcttagttgggtccactggccagaaaaatattctccaggtaaatctggcatttctcattcttttaaaactctccttcttctaggtctgtcattcacttaccttatgttaacctcacttattccctcttgggaaagtgagaaggtaattagtttctcaataagatgagtaaggttctagaaaagcttcaggcacagctaatgtgaagtgctgaactcagaagaaacaaacagaggtaaggagtgtgctcataaaaattttattgtaagatgacccagtgggtcaaaatataagtaattttagttgtttctaaagtgcagcttcattcgatgtggtttctgtttcttatttctcactgtatagggatattgacatgcatttgctctatggattatctcattactttctgttgcataactgtcccctttcatgttgcaaagtacaaactagtctgggtcacaatggagagagagtgttatatattccatttgcaagtctaaaataatattatttccaattgatttaatggaggtgcattttctccatctctctttgtttcttgaaatgcaaaaataggtttgagcttcactgtgcacatgtggataaatacaactcatttgccatgaaaacaaggctcaattttgtatagcaattagaaatcagtttaagcattgctactttaagtttgtatcctcatttctacaataaataaatcattataatacttttttattctgtctaaacacatctcatctgaaaggcaagatcttctgggactcaattcattcagttggttcatgtcattctattatgctaataaaattggtatttgcttattctacagcttctgtgtgggggtttagaaagtctgtaattaaattcccaagatttgtggcttcttacaggttttgaaacagaaaaaagtctgtaataaggagaaacagaatgatcaatgtgtagcagttagtgggacatttttaaaacaatgctacaacaccaaaatttaagttacactaaaaataaatgtaatttactgtatttcaaatttgatggaattatggttacatatttttaatgaaaaaaattaatttatcctgatatataatggttatcactggcaaagtgtacaattaaaaagctttggggaaagttatcagaattcctgggttctagggtctgttcaattattgatttgatcttcaatcaagcatcactctttggggacactaagaccctgctgctttgctcatggtcaggaaattcaatgcccaaataggagaagtcatgtaatatcctatataattcctaagagatatttccaaatgagaacacatggcactctcaatgcagggagactgtatatgaatcctgccttacccccagtgtggtctattttggaggtacacaaacatttacatgtagcactatgataagatacaatggagattatatatatataatttgacacatacacacatacacacacatacatatatatatacatatatgattatatataatttgacacatatacacatacacatatatatacatacatatatgtatatatacataactcaccatatctctctctttttctgccttttttctttttaaatataatatgtatattttaaatataatatatatattttaaatataatgtgtatatctttttaaatataatatgtatacatacatatatgtatatatacatatacataactcaccatatgtctctttctttttctgccttttttctttttaaatataatagacacgttaagggaatccaagttttaaaaactcttagtcattttcaggagatttcttaaaacaacccacaacatagtaagagatatagtaaaagagcatttcttatcatctttatttgttctattttaaaatgtagcaactagaaatatatatatgtgtgtgtgtgtgtgtgtgtatgtgtgtgtgttgtgaatatgttctttattttttactgcatggagctgtcattcactcaataattcaatcatttctttacccaaaatttccagggactcctggaaatacatcagtttaagaaaaaaacttacatactgtcgtatgttacaatgtagtatccattatgaagaataaagtggaagaatgagttaggaatacttgggcagagtagaaaagacagtggttctaattttgagtcggtagaccaggaaaagtggacatttgaacagaaaattgatggcgaggaagcaagccatgccaatggaaacaatccaagaagaggaaacagcaaagacaaaggccttaaggcagaaagtggcctaacttatttgagcaatattcaacagccctgtaagaatagaaaagcatgagcctgggacagtatgttagagagagggtcatagagggaatggagacacaggtcatgtaaggatttttggtatccttcaagtgaagtagagagccatgggaagtttcagcagaagagaaatgtgcactgacttagttttaagaggatcaatttggttgctctggtgaaaaaagactgcaatgagagttgtttggatgcttttccaagaatccagtggaaaatgtgattataataggatgagaatcatagcactggaggtaaagttatatctagtagaatttgctggctggaagtaggacatgatatagagaatggagtgtagatgttttgtttgttttgtgtgtgtgtttggttttacttgaaaactggaaggacaaagttacatttacaagatcgaaaagacaggactaacacaacaaaataacgacagctcagttttcatcatgtaaagttgaagagacctattaagcattcatgtgaagatgataagtaacaattgggttaataaatgtgaaatttagaagaaagttctacactttagataaactatctgaaaatcatgtggacagtcaataaaaacatgagactgaatgagctcatcaaatgcatgagtatagctagagaagaaagcaaaaatgttaggacttgtggtctcacatactccagccttaaagagatcaatcagatgatgacatacaagcaaaggtgtcagagaaaaagaagaaaataaaaaagaaaataaaataaaacgaaagaaaatgtatttaaaaaggaagtggtgttcaactggggcaaatgctcttcataagtcaagatagatacaaatggatttagcaatgtggaaacaagcaatgtaaccttggtaattgccaattactatacgatatataaattaatcatataatcacctgaagaaatgtaaatttgctactgcaaaacaatggtacaataagattcaactacaggaaaattcaccatagtgaaagaaggctaggaagatttcttagagaaaatgatggtcagaaaaatgctgaataactagtgagcattaactgggcaacagagggaagaactgcccaagtcaagggaatgtcagcaggggactaaaagacagcaagtagagtttctggagaacatcaaagggaacgagggttaaaattagaggggatagataggcagcccatgcagtgccttgatatttacagggttttcttttttctgttgggttttttttcaattattattatttccttgtttgcttttttcttattctaagaacaatgggaagccattaagtggttttaaaagggaatggggtagagataggggtggtggaatattcttacattcacactttgaaaaagatcactggctgctcatgaaaaaacagattagtagagactactatagatgacaaagagaaaaggtgaattgcctggaaacttacagtagtccagggagaaataatggtagattggcccagagtggtcagtggtaatgtcagagagaaattggcagattcacgagaatagaaattcctttcaagaatacagttgaaacagcagtcagaaaaaattaactgaacttgaattaaataagtgcccttaaatatttgtgaattatttaaaacattttgttattcttcatttatcttcattgccatcagtactggagaccaacaagcagacacctagaatgacagtcctgatcttgtcctcatgttagcccacaggaaagtacatttatggtgtactgtgtaagacaagtgaaagtgaagggaaaaccataaattttattactggaataataagataagaagataagatcttctttacctaaagtagttcttgtctgtattactgattctcgtaatcgaaaatttcatacatataaacaatttaggtgggaggaaactttatattaaaaataacttgtcaagaatgacatgccaaacaaagctcatgtaaaaactgcacacctaaattgtatattctagttgtttctattttgaacagggcagatgaaaagttacttgtacatttgattcttgattatcatgcaatacaaggttattttaatgacatccaagcagcaacaatatatctggcctaaacttcgaaagagtcattaatttaattcattcttttctttctttttttttttttgagacggagtttctctctgtcacccaggctggagtgcagtggtgccatctcggctcactgcaacctccctctcccaggttcatggcattctcctgcctcagcctcccgagtagctgggactacaggcgcccaccaccatgcctggctaagttttttgtatttttaggagagacggggtttcactgtgttagctaggattgtctcgatctcctgacctcgtgatctgcccgccgctgcctcccaaactgctggggttacaggcgtgagccactgtgccaggcctaatttaactcactctttatgtgttttcccatcttggccaagcaaaaattacctaccagcagaacaggatttcaaaacgtttccgtgtaatctgttttctctaagatgggttaatcatctgatgggcactgagttcacttaataagcatgctgtctagagacaaggcaggaatgctatttggcctgaacaatcaccaaatagttcctgaagtcattaccttacacctcagccagaagttatcttgggaaagacaatcaaatctcttggctgcttacccagagtttgagaatcccagtaacgtatattcacaatgattcacaatggcataggattgtgatagcaaattcaaatggaaactaggaaatagagagcaaatatctgtgtatattagacacagcttcccctagaaataaagatagatgctcctatgtaatctgatgtttgattcattgaagacctgaattctgattgtcagcaaataaaacatcacttttcatgcatgaaatattttttccttataaaactgagggattaatttagatttaggtaaaatatagctgagatacaagataggttttcaaactctttacaagccttttgggaagtgttaacaaatgctttgggatttttcacactcaaatgttatttaacacatctggcacaacaggtggcatggccagtaggtcatttcagcatgataatttgacttcatatttattagagcaaaatatgtgtttaatgagtatttcttttatcactatttcaatcatcataactcaccatatctctctttctttttctgccttttttctttttaaatataacagacaggttaagggaatgcaagttttaaaaagtcttagtcattttcaggagatttcttaaaacaaacaacccacagcatagtaagagatatactaaaagagcatttcttatcatctttatttgttctattttaaaatgtagcaactagaaatgtatttagtgacacaacaactcattcacatttaattattcatctattcattacccaaatatttgttgagtttatgtgtaaggccctagtcaaaagtagttgtaatatacagtttatattttaaaattgattccaccacttaacagatatatcaatctcaatgatttaaaataaagtatgtatagtaccaaacatgaatatatgtttaaaatttaattttggcaaaaaattaccccaggaaaataaacatcaccattttgccctacatgatgacatttatcattggcttcctaaaacataatggaaaggaagtttgcattatcactttatatattctattattaaactttcacttatactgatttccatacccaaataaatcttgacagaatagagtcatactgctttgttgttcaaaagttctctgcagccttaaaggtaactgtcatcttgtaagcaatgtttcaaagtagattagagtctgaacattaagttttagatgtcaattatctttataacttataaaactgatagagatgaatacatttagatacattctatgttattaaagtttaaacaaattaatcaggatctgttttcttttaaaattatataactgccttagctctattgatatttgtaaaaatataaatgcagaattcagaattaaccctgcataattagagaagaggaaaaagtaacttaaggggaataataatgttgctgagaaatgaataggatgacaatacaatgattaaaaattcatataaaatgcaagttgcatcaattataaggaacacagtgtgaaagggtgttcctatgttgaaagataataaaaactattttaattttaaatatcaaagcatttatagttacaggtgaggaagcactgaaaatagataaaatttaaccatctaaatatcagaaaatatatcagctatctcatataacataagctattattggtaactttaaaaacaacaaaagaatgtcaagaaatcaaaaattttaaatgtgaatccttattatcaaagcttgtgatagtgatgcccaagtgtgcattcaaaacaattactttttttccagctatttagagtaatatgcaaagtgcaaatgggagatgaaatatttaattcttattctcgcaactggattcagcttaatcagttttaccttagaaagagatctgttatgagtaacagtattagatgttaaaagtagtcacatgcagttaatgtcagggtgaaacaactgaaatcaaaggaggaaattaattacatagacattctagttggaatccagttggcatgcatgatcaagtgggtcacattttgttttctaaggaatttggtaaacaagtctgtgtcttttgatatctgtacacagagtgtactattgctactcatttgatcttacagaatactatagtcttccataggttaactgattgtatgccctatctgtatgccttattccagtgagccctgtaatagcacttggtccaacagcttcagtaataaagataatgaactcttcctggcactgtggaggtcaaatgattcataattttcaatactaattccaaagacttgctaatgtgaccactatttcaacctaattgactattctttaggtttgttatttggaaggccttaatttttgctctatgttggtatttatcattattatttgcaccgtctgtcttgtttattctccctctttttttgcttctttttttcttttcttgcaactataaagaatatgaggccataatcattctctttttgtatctatgcagtttaccaccagatcctgcaggttttaaaattatgtaagaattcacattgatatttaagagtttcaagtcccgaaacatcagctggctcccttcaattaattgctctttttctgcacaaggaatctgcccacacaacttaccttgatgtacttggagccaatttcttctgactcactgtagcagttctgtagctttccggctgtgattaattctcacatctgatattaatttatatgctcactcttaagtcatatactcttcatttagatcttggttctatactcacctgatctagcagctttatccagaatagtccaaataagcctaggtaatcctagttcaggacaacaattctctttctttctccaaatgaacaggcacttttatgtttccaagtgccactgaagcatcaatttactgagatacatagcagttaacataattaaattgaatcacacaatgagctttgttgaggtctgaaggaattaatagaactccaggcaaagaagaggttaaaatttttgaaccattttagctaagcatctgagatgtttagatatcatcttctatttcagtataaggagatctaatttcagccaatcgctgccctgtttatattttggaaacttctccaaataattggaaaatgcattagtgcaaagtcactcactcctgtctttgatgatttatttcccctcaagagaaaaaaaaaatacaatgacatgttatttagttgccaaataaaaagttgtctcagcctggcgtggtggctcacgtctctattcccagcactttggaaggccggggcggggggatcacaaggtcaggagttcgagacaatcctagccaacatggtgaaaccccgtctctactaaaaatacaaaaattagctgggcatggtggtgcatgcctgcaatcccagctactcaagaggcagaggcaggagaatcacttgaacccgggaggcagaggttgcagtgagccgagatcgtgccattgcactccagcctgggcgacaggcaagactctgtctcagaaaaaatagttgtctcacatatggaaaattccatatctgttccactaccacctttattattcaaactgagatttaaaaatcaaatatacttgttactccacccatttaattttgtattctcctctttcattcacttaaaaaataaaattggaacttatttattttccttaaaaaatcattctatacttcacagagactattggaaactacatttcataaatcagttgaattataaggaatcatgcagtgaattcctaaaccccaaacactctttttttatagcttttacttctttagaacttctagacggatataagttacttgtttgtccagtaacttgactgcttattacatgtttaccactgctgtagcagctagatttgaaaataaaggacgttttccagcagtacctaacgcttatggtcacattatagaatacaaaagcacacactgactttttcaggagttttaaaataagtatattgttattttattttcctctttagaggcttagacattggtcagaaatagcactgtggcagtcatctagtggttcctatgccaggttgcaggcattggcctgagaggtattctgttacattcagtgggtgaattcacctgatgaagcatgttatagatgttatacatacatgtctttctacctatgttaaccttccctgagaccttgtgtgggaaagccactataaagacatattctaaataggtcactcactgtcatgatctggttgtgtctgtctctccattatgtctctctattatccgcaagtacatgatggacccttaagataataaattaagttagattggtattttaaaatttaactatcagaggcttaaattataaatgaggtataaattgctgttttaattaatattatttgatagagtagttatttcagagcaaaaattaaaaaaattggagaaatcatgaaatataattttgcaaaacagatactttgaagctatgttggcaattacagcatgcctgaaatctatctaaaatttatcttttccacattaaaatatttttaactattaatatgatcttagcatttcaggtggcaatcctgtgacattcttcatatccaaagacaaaagccatctctaggacacaaataaaactttccagtggagcttgctggagcacttctcgaattcctatccagcaccgtcattctacaatctgttttctttcaaagggaatatatttcaactgagatttttcctctttgactgcatgttatataagtacttcactgatttagttctttctactaggtgatcacattttcctttttctgagtctaccgatttctgcaatttatggactgagcatctcacactactctctgggtggtttatgtaaataacaataataaaagcccctgaagctgcatccctgttcccagtggtttcccactgacctctttcagcttgaaaaggttctatctattgctgatttttttttccttcctactggcaattttcagcctactgtgcttcttcatctcatttcttgactctttcttgacttaagaattaattattgaaatgtatcagatgcactctgaaaatgtcagtgtatttagttggatttacaaaaaagcacagcttttcagccaacatgatattggaagtgaatatcaagtagcacctttctccacacatccttttcacaggcaacagaaaaacataaggcagatgatctataccatctctgaaaaggtttgtgctgcataaggacatttgtctctatcgctttaaagcataatgtttacctttgcattttagtgccttttttcccattgaaactttaacaaacactttgtatagaactacaagagactcacagaagctgtccatctatcctcctgcctcctaaccagcctggggctaatttaatctatccaattcagacagttattgatcccagtaaaaaaaagaattcactacctcccttgtattgggtagaatattctacaaacctgtcctcacaaatccagatacaggaattcatacactgaatagcgcaaagaggcagctttcaagtgaaaacaatttaaactcaaaggttaaaatcacctcaaaagagattctaaagtatttattaaaacatctcaggtatagatttaggaagaaaagagacattgtaagtcataagagaaaattttaaaagatatttaaataaatatatatttaagtagttaagatttcatccatattaaattgtaaaataattattaggcaagttctactttaggtacttctgttcaatggtgtatacaaataacaaaagagacaaaatccctagcctcatagagcatatactccagagggggaagacaaacaacaataatagcaagatgagtagacattctagtcatgtttaaaggtgattagtactatgaagaaaacacaaggaagggatctgagacatgcctagtggtagggcaactgctacttaaactggagtaatggaactcatggagagtacaatgatggttaccagaggctaggaaaggtagtgggggatttaggggatgggacaaggaatgactaatgggtacaaataaatagttacaaagaatgaataagattgaatatttgatagcacaatggggtaactaaattcaataataaatttaattgtacatttttaaataatcaagagtatacttggattctttgtaacactatggataaatgcttgaggtgaaggagatcgcatttactctgaagtaattattacacattgtgtatctgtatcaaaatatctcatataacccataaacatatacatctgccatgtacccacaaaaaataaaaaaatataaagataaataataaataaataaataaataagtaaatgaaatactcggggtaaggtcttaatgagaagacgatgtttggacagaatgaaggtggggagggagcagccatgaggctattgggggatgagcactatgagttaagtataagatcagagcaagggccccaaggcaggagtatgcttgccatgcttaaggagcaaggggtctggaatgggtgaagaagatggaggccaggatcaaaaggaagtcaggaggagagaagagtggatgaaattggtggggtaacaggacctggttgcatggggacaagtaggccagctcaagggctcaacttttactctgagtgcaatggcaaagcattggcagggcagcggaagaatggcatgctctgccttatgaatttaaatggaaattatggttgctttgttggtgagggttcaagatgttattgtaatactatagggaagagttaatggtggtttttattatgtgctagtgtggcgttggtgagaagaaattgcatttaatttaaaattatagccaggagacttttctggaagtttggaggcagaatgcagagaaaggaaagagtcaagggtgtctctaaggctttggctgattgttaaaagcccaagcaatttctacctcagtggcttttgatgttattactggattgccataaaataattgttcataatgaggttctagttgctctttggggaaattttaaattgaagttgttaaaaataaaaaatctccatgcttttaaaaagtactagtaatcattcaacatttttattttgttggataatggtattttcctgactgtgtgtcttcttttatttcctagttgaccataagtgttgttgaacttttcattgtgttggaagggggaaggctaaagttgggggtagactttgattctgacacaacaaataaatggatcatggagaaaataaaaaaaacaggcaaaagagagattaacaaggaaggagtctcagaaagaaaacagtcaacacgattcagaagtaagatgtaactttatataaagagtgttacgtgggctgggtgtggtggctcacgccggtaatcccaacactttgggaggtgaaggtgggaaaatcacttgagaccaagagttcaagaccagcctatgcaacattgcgataccccatctctacaaaaaattaaaaattattcaggcatagtggtgcatgcctgtagtcccagctactcaggaggctgaggtggcaggatggcttgagctgttgaatgaaattatgaagttacatcttacttctgaatcgtgttgaatattttctttctgagattccttccttgttaatttctcttttgcctatgttttttttcttgttttctccatggtccatttattttttgtgtcagaatgaaagcctacccccaactttagccttccccactccaatacaatgaaaagatcaacaacacttatggtcaaccaggaaataaaagaagatacatagtcagaaaaataccattatccaacataataaaaacgtttaatgtttactagtactttttaaaaggatggagttttttatttttaattttaacaacttcaatttaaaatttccccaaagagcaactagaacctcattatgaacaattattttatggcaatccagtaataacatcaaaagccactgaggtaaaaattgcttgggcttttaacaagcattgcagctatgcaagattccttcttgctcatttctgatttctagaaacatacctgttgatcattagcactgttatcttattacataaatagaactgatggatgtatatttggaaaagccctgtgtgtttttctccacctactcattgaaaacaaaggctttagaaggaaaaatatggagaatttgtattgtaacatcgatattctaagcacaaaaacaagtgtaccatataactgcatttttctaaattcaacaaaatggtattttgtgccatcatttcatatgtgcctgccctcctccttttctttttctctttctctttcattgtcagtattttcctcatatctttcatccctgtgactccatcctgcagctcctgaataaaagtctctttctctacacttaatgtctcatgtctgctttagagtcttatcccagtcctaagatcttctgaggaaaaatttctcaggaatccctctgaaccatctagagctcacattgtcttcccgtgactcagggggtaactctccccaagctgcccttccaatttctcttctactcattgatttttcttcatgttgtcagagatagatgtgtcttatctccccacctccatcatgtcttttcaaatcttttgttaagtccaagttttttctctgagggctgaggcttttaaaatcaaaaagctaggaaagagttcgttttcctctaatttttgaatttacattttccctgttgtcaggatactgaataacctgacttctgcctgatttcagaaggtaaaacaggatgaagagaagaccaaagcagatctggaaatataagaaaaatatgtaataatatttcaaaaatattaacattgactaccagaaatactacagataacatcctgtactcgcttgactcttaaattgcttgtttaccaattcaccaacaccaagcaatttcatttacattttggagaattatgtatcctgttttcaatattttcttttactcatgcattcttcatctatgaagcttccatcttacgagatggaaattaaataatttcttaaaattagaaattaatttgttttatgatcacctatgaatagttaacacattacttaaacacagatcttcatattatgtgacaaacaattttctacttaacacttccttgtatgtttgtatattaatataaataaattgtctgccctccaattagaaggaaagagtaaataagatacttgtagtacatgatgagagattattaggatacaggagaaagtgaaggcaacatcaatgggagaaaaagaatgagaggcagagaatcaacccatcttggctgagctgcttcaagaatggtaaaacctttattcttctatgatgttctggtgccttataaagaggatactaaatgggtatgacagcagaaatacagtaaagactataaatgtaatatgcaggctgtttcagtgtttaaaatagaatgaaaaatttggaaatttatgaacatttagaatctcattagtttcataaataaccacagtctcaatgagatcatcaaaactgctagcataatcaggtttatactgatttactttttaatattactcattttgacaatgaggagcagtttctgaatgaattatgtgctgtaggatgacactgtatggaaaggagaactagagtgggcctcatatgaggaggcgtactaattgatacagtaaaactttttgatataaaggagtttcctctataagctgctatggcatttaatgcaaagaaatatggttcatttttaacattttattataatataaaacatcctttcaatatgtttttaaaaatgcatgtgtgtgaaattgttttataaattgagaacttttccccctgttgaaccataatctccattagtagaaaaagaagattatgtagatttttttctctatcaaactctcaggaacattcctcttccagacatcaaagcctttctctcatcatactgctcttaataggcctcaatattgttagcttttaaaatgaaagtattgagaagttcatttatattcttcttataatcaactttatcttatttatgtctagacatccatttaaaaaaaaaataagcagacagcattgccaaaagaaacgaagcaggcgaaatagcctaaattgtccttatgtctcctttctagtcaatttatttctctacccaggtttctgatgggtatctgtgtttgtgcaggaactctgactgtatctacttcagctgaacgctcacttatctgagtctaataatgtcagggccctagatgcaaataggatggagaagactggaagagagattgtgttagtcacatcacgcatttctcagtttcacatcatctgaaaaactttccctgcctggtttcctcagtctttccacagctgccctcatcctaatcccatttaggggggtttcctttatgcacttttatggtggcctgtatttgcctctctcaggtgtttaccacatgtttttgtctttattgatatgttcttttatctttctaaactgtaaggaactttactagttcttaatatagcaactagtcatctgtaagtattcaatgttgtctggtggataaatgaattaattataaaagtattcaaacagtgtacatcaaagaaggcagctcaagacatgctgtaaatatgagataataataacttttgatattaagttgaaagctacaagatatcaacagtgtctttagataagttcaataagcttttcagagtatagcttcaactgtgcttatgattcatatctaatgcagaataacaagagaaattcatgggaaaaaatatgccacctacaaggaacagatttgcacaatactccttatcattagtaaacagaaaatgtcagaacaggtgtatacttttgaaacaaaagaattcaataccatatacaaaacaaacaatggcaagaacaacaacaaaaaactgatatcaaatgtatccccaatttgttactaattactaattacttagtaattagtaatactaagtgcagatgcttttctaaacactttttactcattttcttacttcatctgtattgcaaccctagaagaaatagttatatgagtttcatttttataaaaataattagcgtgataattattcttcagttatctttactttcacagcataacccattttttcctacttatcattacattattaaatgctttaatgaagtacaaatcaattttgttagaaattgccaatctaaaaagaaaaagattacttgctctaaattgatacaacccgggatatatctgtatcttggaacattttgtggtataaataaattttaaaaatgctgacagagaaatctctacagcaaactatagacaagttttgtgtatttgtgttgtgtgactgtgcatagagaggaagaaatatgtggtagtaacatgacaatcactaagcccagaatattttcatatgcagaggttcatgaatttccttgggattaaagtaaatgtgttgtgaattctaccattccttttgttttattttcaagtgctaacatttgcctatccctaaatagtttttgtttgtttgtttagttgggagaatttgggtatacaatttatatcagtatttttgttgttattgttgctatttgggtgctttgtgtatggtattagattcctttgttttaagagtatatacctcttctgatattatctgtttagtaatgatcacgtgtatggtcaactcttctccttttaggtgatgtaaaatttttccatgaattactctttgtcattctgcgttagatataaatcttaacaatttttaaagctatagtctgagaagtttattgaactcatcttaagacttttttgtatcccatatctttctgtttaatatcaaaagttcaacctttgatcatgcatttttactttcagaagatgtgtagtaattttctcaccaactccacatcttttgagatgtgttttcatcatgaatgagtttattttgacatccagatagcatttgctgaaatgtgaatggtgtgttctctgctacttaattttctaaggtcatccctccagctttctaaaatttgtcatttattcatctgtctttaagcttgcaattggaaatttgggaacaaagtggaattgtacaagcagcaggactgaaaatacaaatattcttcctcttgttccttgtcatattggaaatattctatgattcaatgaagaacactttgagatacagaataaggggttatggtaaatatagtgaatattcaatcattgtgttctttaaatgtatttataatacatacaaaaatacaacaaagaaaatattttattatttccctttctcatggtaagaacagctagattctttagtggggcatttttattaaaatgagtaagaaatatatcaagtgccatggtacagaatatttactatcttggatgtctgatgttgctctggcactaagataaaaagaattagagcatttttttttattgactagtttcctaagctagggtcctccatgctatcagtgtgcatactcagggaacaaatgtaatttcatatgtgacaccatttaccgtatgttataatttgacaagcttagtgagaacttggttcatgaaaagcaaacattcataactttctttcttggaagcctcattacaaaattacatataatataggcattagatttagaatttaaataagagaggaatttaatatcaactaaaacaagcataaaagaacattttgaaaagtaattacccagaaatcttgaaactggaaaagaaagaatgtaggtcaaaattggaggtcctaatgtacagtgagtcattcagctgggaagaaacccgagaggtgaggcaaaaactgggtaggggcaatggtggtggaggtgatagaaaagaacctaagataaaaatctagtcaaggggtctaacattcattgagaaactatgtgtagtgaggaaaggaactacctatgtctgaacatgaagcaaaccagttgtaggttgagcttcatttttctcaacggcaaacagttttcatttgttttcaggattgaagagtaaaactcttaaggatatccttggtattattagatgtcatcttacaatatttatcatcttaatgacatgtttaaataagtatgttttataaaatatatttgttgagaaatagaattttatttctatgttcctatttcatggaaaggttattcagaattctcatatacatctttggcatcagagacttgtcatcaatacacccatgtgttgagtcatttaacatgtgtttctcagagcacgtcttcacatccatttaggttctttgagacgctgcagcactctcacatttgtctatgatgcaaattttaatgcaaacccaaagtacccatttgctttgcatggtcttcaccagacagtcagttaatatatttcttaaaggatcttttaaaaactcgacaaccaacacttgcaattatccaggcatatgcttatgactaagcccatgttaaattctgtttgcttttattttatgtttgtaaagatcatctcaaatgacctttataaatatcagaactatcactagaggatgtcattaggtaaatgtctcttctgacaatagtagtatgagagccttcgtaaggactaatacctatggtaatttttcttagaaatgattttagatgaaatgaatcaaaaagggccctagcacaaaacactcaactttaagataatttaaatagaatttaacaaagagatgtttaacaaagaagtggatagtgtataggaaaagaaacagtgcactaccccatggttggtaacagggcagctaccaccaatactcaacctgaagatgcaaaaggagataatgatttccaagataagaaagagagaatagtgtagagagagccactttcaaagatgaggcctagccagcatgatgcaaccctgctgggatatgagattctgacctttttctttcctttttctgatctgctgaaagagttctgcacttgtctaacttaatcagaagcctcccagggcagaaacaggtagagaaggatcaggggtgtgtggtgtagatctaggcagtcaaatataagatatgcagcccaggaagaactttaacatctctcctcccttctcttttcttctctcccttctccttatgtctcatatgtgtgcgtgcacacacacacacacacacacacacacactaagttgacttaagcttttccaaagtccatcagcaggtcagcatgtgggatttggattctgactatatgaaaggattaaacttttgcattgttacccaggaagaaagaagacaaattatctgaaaacaaaaatagccattctgatgcctcctgtctcattgtctagtaagtcatcctaaagttattgcccaaatgcaaacattaatgtccagattgccccactcgtggaaagaaaaaaatcatggatttttttttctgcaagtaaatacaaaagtttcaacacataaatagagtgaaggtaacacaaatagttttcagatgaatttaatcattcagatgctgaatataaatgacaatccaaaaaacattggccaattaagaaaataaaggaaaagagtacaaaagcagaggctggaaaacaaagcaccttaaaaaatactaaggaggcttcccaggtttgccatggtgaattttttccttactcagtaggtacaaatagaaaatgttcacagaaatatttttgtcatgcagctgcaaaggtaggcagatctgctttctatgattgatgatatcgtttttccttttaacatgacagaatttgttaaaaaaagaaaaacaactgtgctcccagggatattgggagctgtgctgtagacagcagatgtatggttcgtatctaatatccaaatacattaaatatatatttttttcaaatgctatggcattattagaaaagcggaaagacagtcctggctttgatgaagcaagaaagaaaggacattataaaggaacgctggaagaggcaaaaagaagaaagaggaaggggaaagaaaggtaaaagaaaataagtatcagaaaatgatgtggagagagtgtaaacgtagaaacaggaaaaaaaatgtgattgcaagaagaaataggcagacaccagaaccctgatatgtgacatttgtacatataaatttagtgaaagacagttgcagtttctcctgtcataatagccaatgggttaaacactgacatacacacacactgtacacaacctttgtacctgttggcatcacataagaagtcggtctacttctagtctaccttctcaagtacagctctatgcctcttcatgggaggtgatctggtgctagctaagaatgactaggaacaacatgagcagacaatataggaactagaacaggtgagtacaaagcgtgcagtaagggtagagaaaattatgacacctgttctgatatgactcctattgttagtggccgcgaactcgtatgcgtctgcagcaacctcaattcttgctgccagagaagaaagaattcaagggaggggcaaaaggcagagtgagagactgagacaagttttagagcaggaaggaaagtaaagtaaacttggaagagggtcaagtgggcaacctgagagattcaagtgtgtggcttgacctttgacttggggttttataggttggcgttcttgcagggtctgattttcttctccctggactcttcctttgaggtgggctgtctgcatacgcagtggcctgccagcccttgggaggggtgcacgtgtcgtgtgtttactggagatgtatgcgtgctcacttgaggtgttcttcccttgccagtctaatgtttctagaagtcatataccagttaaatgtggccattttgtctcttaatgtgcacacttgagcccacttgcccaggtcctgaaatcttactggaaagctgctgatcaccagcttcaggtgtttctatctattgggagactgccattccctgacaccaggtgcaaccaattattcttttagacagtgaaacaaccacctgaccatcacctgatggttgcctgacagtcctggtggggggccctctcctgctctgatcatgtctaactagctacctactctaacactctaacactaaggattcacagatttttaaatcactatctcatatggaactcaccgtaagcctagaaaggtatttgagtagctttttacttgtcttctataatgtaccctagttattttatgaattttcgtatgctttacctacagatcactggttattagaaccaagcaaccatgggtctgcactttgtttgatttgccagtttcaacatttatttaatttgatcacaaaatagtgctaatcaaattctccaaacaagttttgtgagaatgtaaaaacaaaaagaaaacaataataataaaagccattactgattatttcaaatttcttcaataaaacaaacattaacattgtcatgactgtctcaatttttttaaaaagaaactaacattttaacaaaaaaacaaacaaacaaaaaaataccaccatagagtattgacatttttttaaaagcagcgtgcaactcaaaaggatcttggcttatagaaaaatgaaatagaaatatccttagaaggtaaaacgtattgatttaaattaacagtaaattagtcagattcttttcagttgcaagttacagaaacccagttctaataacttaaccatatttgatgttttttacaaaaactctctggcaccaactggacgtcctacaatttaactcaattctgatatattatctagagttagtgcagtcccacaaattaggagtcagttgcacaagaccatccccaattccattgtcagccaaagttatggtatcctcaagttacccatacttgacctggctgacccaaaatgtgggggttccctcaagcctttcctctcctccccctccaggttggaaaatgtgttagaacaatttacagaactcaggaaagcactaccattatatttttattataaagaatacaacccaggaatagccaaatggaaaagatgctttaaaatggtatgtgggagtgggtgggtagcccagagcttcctgccctctccagacatgccaccctgtcagcaaactgttgtgttcaacaacctgaaacctccccaacctcattgttcaagtttttactgagacacttcattacttggacactgtattagtagtccattcttgcactactataaagatttggcaattaataaagaaaaaagtttaattggttcactattccatgggctgtacaggaagcatggctgggtaagcctcaggaaactcaatcatggtggaaggtgaaggggaagcaggcatattttacagggctggagcaggaggaagtgagagaagggggaggtgctacacacttttaaacagccagatctcctgagaactcactatcatgaaaacagcaagaggggaatccacccccatgatccaatcacccctcaccaggtccctcctccaacaccagggattataatttcacatgagatttgggtggtgacacaaatcagaaccatatcagatatgactgattaaatcatggccacttgattaaactcaacatgtagcaacttccctcttctccaggaagttgggagatggggctgaaagttccaaacctctaatcacttggcaagcccctcccttgacactctctaagaggccaccatgacacaccttgttagcataaactcaagtatggttgaaaggggctcatgatgaataacaaaagacatgcctatggctcagaaaattctaagggtgtttgaatctcttgtgacaggagtctaggacaaagaccaatttttttttttaattacaccacagcataaaaagagatttaatggtctatatgtctggaaagttcagggtgacctttagacatgactgaacgcaagggctcgaataatgtcatcatcatgtctttttctcacaaacttcttttctccactttcttctaactcaagtttattcttagatggtcttggaccaaattaggcaatgattaattctgattattgaatccagattgctccagatccttatctacatatatacatgatcattggctctcccaatgtttgaagacattgcatattgaatacacatataattaaattttatttgacattgtcagttatgctagttttactgcatggtacaatgggatttgtaaaagaagatcatgtagtaactgcttgatattgtaacctgtgatattatatgaactgtatttattcttacatacggacatcatattaaatatatagcctacatatgtaaataccatattaaatatgtaacctatttatgaggttaatgtcaaaatattagttttctttcaaattatctcagcatagatattaagattatattactaactttttagtctttttaatccaatttgaacagtatcgaatagttttttgtgtgacagaaaataaattattttatttttgaatcaactctatgattttaagaaatattgatcgggttatttcccaaagctgaaaatttaggacagacagagacgttttatataattggatctcctgcacagtagaaggagtgaaataggcaagatggtttaataaaaatatcatttgacttttcacaacagtgaagtgattcattgatctccacttgggttgtcagagctcaggagacgaagtttatcagaagtgaaagttgatgaatattggctgtttatggctttataaaataatattggctgtttatggccttataaaatattaatattaagtaaaggaatgttttaactaatgaaatttactataagcctagacttagataccacaatgacaacttggagaagaaattaacatttgcaatgatattagaagactataagaaaaggactaaagataagagtttggcttgaagacgcgtatttgttcatgctttaacttatttaacattcaaatattttaattgaacacctacattacgaaagacaaatattaagttcttggtttagagaaataaagaaacatggctcatgtacttaaggagcttgcaattgaggagtcccaatactttaatttttgtttcaagaagcatgtaacctggtcacagaaatagacgagtaaatggataatttagagtgtgataaatgttaggtatatagatagtagatgatacagaaacatgagatggagcatttaaaaaaaactggaataggcactaaaatacgaggagtgataaaggctaaaatttcaaagcttaatagaagttgagccagatactgaagggatgggctactgcacatgattaatgattaatgcagttgagaagaaacatagtattgtagattctagggacttcaagttttttatgacttagtatataatgcaagaataaagtgattggagatgaggctggagagtgagagatgattgagatactaaaggaggcatttgattataatctttgtgatctattgaaaaatctttaatgattgacattcaaatgtatgtttgaaaagattcctctgagttttagtagagtgggttactttatcctaggctgactgaacttaataatcaaatggaagttttatagatttcgccagggtgtgcagaggatgtaaagtaccacagaccaacagatggaaaagtgtaaagttacgttgctttatttgttttttaattactccggatatattattgacgtggcagtgctcactaagagacaaagggaggtagaaaaacaataatggacagggatatatataagctgggaaatgttttggtggtagcacagagttccgtaaattagcaccaggttggtactgtcacataatttgttggtaggagcacaacagagcagcttgtaagaacagatgagccagggcacaaataaagcaatgaacattaatcagcaaaacttaatttagcattggacatctagatggcactcagtgatgctgatcattattaccatactgccatgcacagagggactcaaaaaatattagttgatggtaattataaactcaatgagaaacatgactagcattccccacccccatttaggctatcctttccagaaaacattttcatgtttatgaccactagtaaaagacaccttgtggagaaatactttgaccattatctaggcctaaagatactcttaattttatgtgtttctttataaaacacagacaaatttattcatacactgtattctatttccagtaaaatgttttatctatttatgttcctgatgactcaatatttagtttggttttatttgagtcagaggtttaagtatgtaatccattaaacttaaagacaaatattactaaatatgactgggatgttcaatgtagcagtaatctcacccaaggtgaatcttattggctattatattgccaatttcacttgaagtagttgatctcacattaatgagtcttttttggtactagaagtatcagtgttctggcttgactgtttaaaagcttgtctgcatgtttcttaattttgtcccaaagacagaaaaattatgaatataaattttaatatatattgctgagcatgagaaggggtaaagtgggggtggggacacagaacttaaaataactaattcaaatatgatgtactcatacctaataaagtccaaatgataataagaaataatgctattgcacatgtaggtccagctattatttggaacagtttatcatttactatacagagagggaatcaaacagaggctgatttcatttattaattttttaaaataataaatgtatggatatatgattaatgctctctcatcttcctttttatcatgcttagaatatcttaccagagaataaaagacattgcttgagatcctctgctatggttctttattcctgcctagttctcttctgcattacccaattttcctcaaatatatccactttaagcacttaaatttcaagcatagaatgaaaaggtaacacaatatcaaaatgttatgttttaacacacgaatatggtctactatataagcattttacttctgatgaaatacagtataacgcaatgcaacacaaacacaataaaataatgtatgatattgcataagcaataaagatcactcctacctgggcgtttaaaattactgttctctagaatttgtctggtctctatgccatcatcattctagatggcaacatcttttatttcaagcttagcatggagaaaggaataggtaagaaaggaaaggggtttaaattctgtttattcataagctgccacataatactttgctttatatttcactgactgtaacttagttagattgctacatctagctgcaagagattctggaaatatagtctttattctggaagtcacctgcccacataaaattatgggataggagaacagatactgggaaatcattaacagtctctgccatactggggaccttggggacattacgttgtgtcctttctctactttgatgtttgtttgctagctttcaagcaacagaattacaaaactctttttccatacactttctccaaattctactataaatatcttctatgacaataaaaaacttctgataaataaatttatcatggtaaacatatagactttaagtacataaatttatggtaaagagacccctccagtacttcttttcttaatgtcttatagtttcatcaagtattagaaggaccttttgtgatctctacttgaatgtttttctaatttcacttttataaaagaaacatccacatataatgtcagatttgctagatatatgaagttttctgaaatctcactgctctgaaagaaatgtttttctaaaaatcaaatgtacacattgggaaaatgttcaaatcaatgtactagttgttatgttcaaaattccattactgttaaagagatttgcaggcgtaacttgcacagcaagttactctgaaatttttcccagctgtgtccttgaaagatggatacttctttttttttttcgtttaagaaaatcattttatctgagcagttgcttttcaatttatccttttgtacgttgatgacatttattctacacaaaatgttggacttacatgtaaaggaaaaaataaggtatttgtccactgcatctgtatgagtcataaacaactcatcgacatgaactttagcaccttaacatagttctagtatggaacttctgcataattcatcataaaagaacataaggcattcagaagtcagtgttcattcaaagatgtgctgcagtattagcagcacaggaaatatgccttctctatacagaatttacacaaggtagctgataagttttatggttcataatggagttattttgatccctttttagttgtttgagaatatcttgaaagtaatacattaagataaattatattgaaatcaattttcttaacacattatatatttgtatacatttccttggaaggttagttaatagcaattttattcaaatttctttaaaatattgtttgaaaaataggtaataaattaacattcaaagaacaaaatggtagaaaggtatacaccctttaaatattgtgaacatgatttttattgctacatgataagaaatagaaaactgatttatatcacgcatgagtcctactgttagtattttatagtattagagttaatgccttggccattttctttagttcaactctcgctaaggcaggagacgaagtccctatcaggattacctgcaggaacatttgcaaaacactcctgaacaccactatctaccaaaactgtgccttactgagccacagagtattatctttgattggactattttgtgtccttctgtttgggacataaatagggatggaaacccgttttctagacactctaacacacataaggtttccatttttaaaagtaattatcagttctttaaagcaaaaatatgtatatatttattgatcaacctaagtaaaagcaataatggtatgaataaaaactgttgatatacaacacaaaactttttttttttttttttttttttggagacagaatctcactctgtctccaggctggagtgcattcagtggcatgatctcggctcgctgcaacctgcacctcccgggttcaagcaactgtcttacctcagcctcccgagtagctgggactacaggcgtgtgccaccatgcccagctaatttttgtatttttaatagagatggggtttcaccatgttggccaggatggtctcaatctcttgacctcgtgatccacccacctcagcctcccaaagttctgggattacaggcgtgagccaccacgcctggccacaaaacttattttaatagatactgactttacactagtaataggataaggatttcaaccattgggaaaagagatgatctcattcttgtgtgtttgttagtagcattgtgctgtctttcatataaagcaggcttagagtgcttatgaattctgccctcaaagagcttacaatatttcatcaatttctttgactaagaacaatttatgaaggcagctcagctgagggtcgtccaacaggtagggaaatgagagcctctggcctgaagtggaatgtgagtggtacacaccaacagccactccttgttttgttttaagttagggattttatgtatggctaatctgagttttgtggaaatactaaatgaaaggaggaagaataatttattggggttagaaagatttttcaaatcactaggtcaaacttgaaacaaacaaacacgggaaatcctttacataactaagtgtagaagaaaagttacagtgcaatcagaaacccccttacttaagggagataggagagtttgtgacaaatgaacttaagcatttatagaaaatctgttaatagtgacacaatagtcccccttgagactctttgccgtgtgtacctacctatcttctccagtgttatttcttttggcataactcccagtttgtttgtttgttcatttgtttgtttgtttgtttgttttactactcaacatttactggaatcaacattaatttcacaaatttgagatatttctcatgctgtttttccacctcccctttctctgtttcaagtcctcccattcttaatgttccatttcaatccccattctctgccaagccttccctagttacctacacctccagttccctcccctcttgaaacacttccctacattgttttggcaatttacagcgtgagccactgcactactcctctctctctctctctctctctctctctgtctctgttattttatttatcctattaaagtttttgttcttttcatttttaccataaaggcataaataatgtactatatatatgtatatactatatacacacatacactgcctataaaatatgtactatatagcatccatatatatgtataatatattattaattatatgccaaaatatccctgtactttgatatttgcttttccccagttatcatgacaccttatgaaatttatggacaaatttagatataaatttagatttggacaaatttagtttattcactttaactgtatataccattttattatatattttaaaattttattttatttgctaatatctctgatgatagttctttgggttgtttctaatttctcattattacaacaaagctataacacacattcctggacattattgacaatatttattagagcttcctgataagacaatgagttccttaaaggaagaagtgctttttaaaatttcccacttgaaaactagcatacaactgactgcatcattgcaatactctgctgacagtttggatggagagcaatgaacctggatccagaagcaggagcctctgttctatatataaaaagaaactactgggcaggaagggattccaactatgattatttggtatcccatgctaacttctcataatacaggttctatcaactaagattgtgttgcattctcctttacttctgtaagactcaccctgatttattttatttcactgttgtatggcactttactgatatattcagaatgctgaagtcctttggaaataacaccatcttcacccatacaaaggtagctttatattcatttcccttctggtggttcatttatagaagcacatgatttattgccaccttaacaaattattctgagtgaagaaagtatctcttcattcaactgtgctttcttagaaacatttcttacagcatttaagtgggttggtgatgtggccatctctcattttgaccactgcacaactcctccttggtcttcctgctaaacgttatccatcctctaatcaattgccagtctgcagctgacaaaatgatccttttctccaattgctttgactgtaattcttttctcatttctttcctcccatagctgcataatctagtcattaggctggagaatatcagctctcatcccacagcttttcatcaaagagtgttagatttgttttctctgtccttacccataccctctttactgatattgcctggcagtcttaccacatccctttttacattcagcctacttgcctccttttctcttcagagcattctctgccttggcttacaagaactttgtcttctttcattacacttttaatagaaatttggtacgattttataatttataaaatgaacagagggaaatgggaaaaagaaataagaacataatgttatcaactcagtatatgtactatcgtagtgttagtatatttcttttcttccgcattatattaaaaaattcagtatcaagtttatatctaatttgtatcttttttctaagtactatattataaggattttataaatataaaacatttttgtatgaacagcaatttcccagaggaaaataacagtacatggtgatacactataaagtattccatttaatgatatagttaaaaataaaattaataatgtgactgaattattctggcaattaaaaagaattatcaattatcagcaatagatggagtcatccagagatgggaagatgaaatctttttaaataagacaatgtcatgagtagacatgctctgtataagaaacaaatgcataaagaatctggtaaaaagctagactggaggaaacagaatactcgtatacacataggaaggaagcagatattttatgttcaaagtcaagtctttagcaccaaggagtatttgttgttatataaccaaacctaaaattagcatttgaaagacttaacaaggaatattttctcatgtaaaatgttattcagttccaaattccttatgtattaagagatgcatcagcatatcaagagtggggtcatttcaagaaaggactgtggaaataacctttgttactcctaaagaaattgcaagttcctagatgattaataataattgtttatattactatagcaaaagtgttataaggtcacttttgtattaattatctccttttatgttctcaacagagttgtaaagtaggttttataatcatcctatttataaatggataaaccaaggtcggggaagttaagtgatttactgaagatggtgaagttagtaatgggtatacaaacctggactactgatttattctgtttttttgtttgttttttgtttttttctaaagtgctgctttttctaataattttagggaggtaggctttgggaagaatgtcagagaatgtaaagagctcaactttgaatttttaatattattcccttcttggttgtttgatatgtgtccagctatgtagaaagtatgttttctaagctttcgcaaagaaacgcttcagtgaatatgaaatgtcttctcagccttacagctattattctgatgtcctctggcaattacttttgtaaagaagacagaagccctttgcttcttttgaaaattatcaacctggatgcttctaagattttaaaatagattcttaaaatattaaacctttcgaactcctgcttaattgaggattcattaatgttgtctgtgaggtggtgagaatgtgtaatcctcatattaagtacatttttcatttcaaaatttatttttagttattacagccagaattatgcttgattttccctctaacattcccaaggtcaatcctcaactccaatctatcatatatgtcatcttctttcccagtgttttaattcagatgtcatagtatctccctatttcctgggagcttttcaatttcctctaattcctttatatgggttctaatatcagagatgctctttatttctaactcagattttagctattcaatcacatttttaatttccttgcatttcttttttacttcatacatttttatcatgtatttcttatttattatttttacttgattttttcatttctctcctcctatttcattgagtccacctatcttgtatcttattgagtatatgactaagaaaatgtcctgtgtagggtaattagtatgtatggcaaagccctatctatgtttttgttttgtttactcatccacgaatgaggaaattttatccaatgtttgtgttttccaacagagtgctcagatcacatttgattccactttctggcagcatgaatgttgaataaatgcccctcatatgcaaatgaaagggaggaaaatgtgcatatttcctgaaccagttcctggtgtctaaatggcatgcaactactatagacctgttagaatacgatgcagttttctattctcaccatcttttggcctgatagtctgaatagaggaagtacatagaagagagtaatacctaatttttacaagggcaatgcctgtattaattgtgtctattttactttaaagtgttcaaatttccttcctgacactgcaagcaagtgccaattctccatataacaaggtgtataatgtacctagagtatatgtgctctaggtaagataaacatacaagttattgtccataaaaggaaaaattgagaatgaaagagctctctattaatagttatgtcagggccccagaacatactaggattgtccctggcaaactgggaagtatgctcacctaaattctaaaactgttcagatggataaagaagaggttcttagatctaaaaattcgttggctaaagaataatattctgctccttgaaaacatagccactatgtggtagaaggatggacactaagttttcaagtgagtggcacatgccttgcacatttggagcaaccaagagactcctgtacacattttagttttgtgatgctggaattttgctcttgcaattgcataggaagggaaaataaataattctttacgtcagtttagttatgttggtcttgtagttcagatatattttcctgaaatgcttctgatatgttgatgagtcccattgtccaattttatcatgagctttcattttttttctgtctccataattatattgttgaatagcaggagaaagtaaatcaggccatgctagcaatatgtcatttgaatttctgtttctatttcattcaacttgataatatatgttcttaatcatgtgctgaaatctacttcacattaactctttatgtattgtgtttaataaatatatgttcagtttttgccatcactttttgtcatagattagcagctcccacagggtatgaaacaacaaattgactcaataaaaatttatgttgattatctactattgtaccatattttttaacttacttgaaatatattcaatacactttacccaaatgaatagatgtcaaatattttactgctagtaacaaagtatgtaccataaagtgaaacattcctaattgtcttatttagttttattagtgaccaccttaaagttcactctagtgatttaaatatattaccgggtttaccatgatgcacacctaacctcttaatggctgactgtgtcaatattgggcataagccagaaggatactgctcccaatgtacaaataagccggcggctgcttcgaaggcatgtaatgaaatgataaagtgtgcttaagcagaagagatttcaaaatgtaaaattgtgttttcaccctcatgatctagttttaagtaatatattacttctctattatatgcaaccttggctattttattgataagaagaaattaaatttgcagagtagtcacttactagtgcaaatttaatacatgaagttttcttctcactaaatttcttgtggctggttggattatcgtgatcttttattctatcacccaatatccagtctgctgtgcagtagatgtcagtcatgagagtgctgccacctccaaccacgaccttctggcacttccacatcccaaaatgctaaatgtggcattacagaaacaatttaaattttcagatccaaaattccatatgcaccaaaaaaacaaagggtctggccacattaaaaagtgggttacagaaggacaatatgatgcacatacctccatctctattccagaagtgctcatcagaaataaaattataaaagatgctggtagagctacctgtttaataagtgattgaaaccgactgtaatttagcatcttaaacttacgtatgtatctaaccttttgcatctgttgtacaacagatttattaaaatctatacaacaaagatagtaaattatcatatctgttttgttgattataactgattattgttcagacgataatgtatctttttaagttcttctttcttacatagattagcttcaatggtaattatttgatggtctcatattaattcctttaccataagttcattaacaaatggttttcaggttacatggatatttatttaaaatatattttactggccgggcgcagtggctcacgcctgtaatcccagcactttgagaggcagaggcaggcgttttgcctgagctcaggagttcattaccagcctgggcaacacagtgaaaccccatctctactaaaatagaaaaattagccgggtctggtggtgggcacctgcagtcccagctacttgggaggctgaggcaggagaatcacgtgaacccaggaagcagaggttgcagtgatcccagatcgcaccattgcactccaaactgggctacagtgcgagactccatctcaaaataaataaataaataaataaataataaataaataaataaatttaaaatacttttttttttatctaactgggaaaaataatatgaacaaaacttcttggctaaattgataagtctacacaatagcaatcactgttaaaactctaacattcatagtaaaaaatcataatttacttcccagtttgaaaattatttttagatatctacatgctactgatggaatctgaatatatatatacacatatatagtataaatatacacatatacacacatatagtatatatacacatatatacacatatatacatatatagtatatatacacatatatacatatatagtatatatacacatatatacatatatagtatatatacacatatatacatatatagtatatatacacatatatacatatatagtatatatacacatatatacatatatagtatatatacacatatatacatatatagtatatatacacatatatacatatatagtatatatacacatatatacatatatagtatatatacacatatatacatatatagtatatatacacatatatacatatatagtatatatacacatatatacatatatagtatatatacacatatatacatatatagtatatatacacatatatacatatatgtatatatacacatatatacatatatagtatatatacacatatatacatatatagtatatatacacatatatacatatatagtatatatacacatatatacatatatagtatatatacacacatatacacatatatacatatatagtatatatacacatatatacatatatacatatatagtatatatacacgtatatacatatatacatatatagtatatatacacgtatatacatatatacatatatagtatatatatacacgtatatacatatatacatatatagtatatatatacacgtatatacatatatacatatatagtatatatacacgtatatacatatatacatatatagtatatatacacgtatatacatatatacatatatgtatatatacacgtatatacatatatgtatatatacacgtatatacatatatgtatatatacacgtatatacatatatacatatatagtatatacacatatatacatatatacatatatagtatatatatacacatatatacatatatacatatatagtatatatatacacatatatacatatatatgatttgttctatatattttgcataccaatttgatacttcacatattaaaaacttcctctacttcattttaacagatgacaatgcttggttttgcgtgattttgacctataagtagaaaatatagtattttgtgacatctacatttcagtgtcaagatatcaatgagaaaaaaagggaaaacaaagcagcaactaagttcatttagtgttttgatgctagaacataaaacagtgatggctcaaataaaaatatgtgttcaaatgcaatgtacttgcatgttgcaaatttatatatgattcaaaaaacaaacaaaaaaaacagcatttcttcagcctctttcaataagatatagaaatagcactggattgggaaacagaaaacctgattcctcagacaactctacgggtaactaactgtgctatggtggcagttgcttcaactttctaggcttcagtgttcttatctgaaagataataaagtaaaatattatagtcatcgatgtcatttctagaccaaaaccccaattctatgtgcttatttgagagggagtctaaaatttcaagaatcctcacatggctgtaaaaaccactaaaaatgaagcacaggtaatgacatatcaattttttgttgttgtttgagatagggcctcgctctgtcacctgggctggagtgcagcggcaccctcatggctcactgcagccttgacattatgggctcaagcaatcctgatccttccacctcagcctcccaagtagctgagactaaaggcatgcactaccaccactagctgttttattattattattatttgtagataaagtgtctcactacgttgctcaggctagtctgaaactcctgggctcaagtgatcctcccatctctgccttccaaagtgccaaatatccaaatgcaatgatgttatatgatagggagattaaatatgaagattgctttttgattttgattctagaaatatgtgagaattttgtctagatgaaagcagcaagtgtatagcagataataggaaacatcaagccatggcactgtaattgtctgggctatcccttcaaatttgttaactaacttcctttctcgttcatgcacctatttaaggccacaaaaggagttttctggtcttaaattactttctacttctctaaatccagacatgattttccatatactttgataattttcaaagggcagatatacaatagtcttaactttttaagttagcaatgtaataaattagtgtctggacttcgtcgtctgtgatacatgtcatgatacatgtcacttatcctgtgtctcatgataggtgtaatttaaactgtgcccctcgttggctctggcaactcctttctcatatggattaagacagtcctcttatttttaagaattagaaaacaataactcttccaacaaatttatgtgagccctgaaagtaagcactttatcaatctaaattagaccataagtgttgtgtttagtgaagcataggttacagttcattgggtcagtaacattaaataattatcatattagaataacaggatttcctgaacttcttaaacccattggtcaattcacaaatcaatccatatctttctttagggaaattaaatacaaattaatgttcctatggttgcattaatgtaatgcttatttactattttaagttgaataaactgaaaagtttctcaagagtctagaattcagtatttttctactatttgcatggggaaaacaaagcttgcttataaagtatcataagttatttgagcaaaatatatatctccctgatattattcgtactatacttaatattttgaaattagttttagcttttgaatctagacttacatattacatgcttttaaacagatactaaacatttgacggaaatactagaaaaatgtatccatagaagccgctaggtaggaatgaacaaaggaatttctaaaagggtctaaaaagggtctctctttgcaggtaaataatcaaaaagaaatggagaacaggtcagacatttatgacacattgatagaattatttctgaaaaggatttttctttccaaaatgaaatatgtttttcttcaagttccatctctctagatggccgatctataatgagctgaagaagggattttgctctttcccaaaagtgttttctgaatgatcagaaagaactagttccatttctttccaagttgagccagaatgtcacaaatcaagaaaggtgaagtttttcagcaaaagggatagtaaatgcactgaactttcacaagctgctgtagtattgtattttttctttctttcttttttttttttttttttttggtacgtgtataaaatgtattgataaaagaatctgtgcacctctgacactattggaagcaaatgaaaatatcgtggggagaaaataaagttgaggttagcaagatcagtcctaaccatagcatttatgaaacataaaacaagttggaccagctttaaaactgtgcaggataagacactcacatgcatccaactggaaaaagataattttcataatattaactggtcattaactgacttttttctttttactaaaactaactcttcctagttacgtttagctttggaatttctgcattcgaatattggaattttctttgacttacttagatctgttcttatgtgtatgtatgcagaaaacgtgtgcattgtcattttatctgtgtgtatgtgtccatctaagtagaatttatggaatatctaagttcttgaatataagccttgaattaagatacagacaaattctcagaaacaaacaaaaatgtatatatttctaactcaatttcacttcttttggcactggtgatcaataaaaagtatagagttgattatagaatttcaaagtgttaattaataattagtaataagcagggaatgttaacctccctctttttcagcagccaggaaactggcattcagagattaaccaagaagttcagtttagaggaggaggatattttgcaaaccttaaaatacaaaatgccactgacagtcaagaagcatctatctctatttaactcccatcacagtctagaacagaagctatgttttcttttttttttttccctcacagctgctgagagcagccttaggtgtacagtaactcagatctcctttttgtctgctttcatttccagtttttttttttttcttttcctcatccattttcattcttttttttgattctagctaaaaatgtgatcattttgctgtatgattccctgtgataaatatattagttaggtaaagctagctcctataacagatagatcccagttgcataattgattaagcagctgagatacacatattttttcttgttcgcatattgatcccaagagtgggcctcttccccaaagaaattcaggaaaacaggctgacaaacaagagccttgtcatcttcttaaaacacaaaacaaaataaaaaagacctgtcaaaatgtcatagtcagccagaagaagaagaaaacatagcagagtggtgtgaaactttttaatggctcaaccccaggaaataaacagccccttttccttacgttcctttgtcatttagccacacagtcacacttaatggaagagtaagatgggcaatgcagaccagctgtaaagataggtactggaggaaaagtgttttcatagctagcagtctctgcacaaggaacttaacattaaatgctactcttagtccatttaaccctgtcacaaaaacatctatatccccaaatctgtattttcagatgacagaaatggccaacataaaaagtctttcacttatttgtataatcaatataccaatttttaaactttgtcaaataagcatttgtatgattacttgtttaggagttcattagttggattatcacttttccatacaatggtattgctttcaggcacatttacatctgaaataatcaacaacataggatatctttcagagaaagactagagattgatgcttattggtttaatgtccttgatttctcatactttaagttccgtgagtgctggggttcgtgccaatcttgatcattcctgatcctcagtattaaaaatgatgcagttttcatggaaagtattactaaataaatatgtacaagtgtgtggtgaatgaatacagaaatactagaaattgatgtaattttatcttaatagacaaaattttaatatcgatagactatttccttttcaaagggacatattttacctatccaggaaagcataatcttgtttttggaggctgatactttttgctttgaaagttgtatttgaaaaattgttttcattaaccttggcacgtagcttttgtacttttcattagatcctttatctacatttttaaagcctcatacctctatttcctcttcatttttttttaactaaagaacaggaatattgtgtttctaactgaaaataactaaaaggaatctaagaacaaatacggtaaatgtctctcaacaaacagttgtacagtctcctggtttagatggacaggagaaaataatattcggatgatttccacatgcatatcggtgttcttaaatttaatgttgatagcctacagatattttatgcagtattatttatggtagaatttcttaacataagaaaaaggcaattaatcacagaaaggcaataattttcagcagtttaaagaggaagattctgtagtcaccatatgccaagcagaatgcacaaggaaatgttttaatatgtagatagtccagaagtggttttcatctgtaaaaattatgatgcatcttatttaatgctaaattttattaccttttttgcaaaaatattatcctcatgaaacatttttattagtctcttgcaaccagaaatattgctactgtttatcttccctagttttttttttaatcctaagaatagctctggaattagaaaaattgtggttttctttaaaacttcaattttaatctttattttactgaaagattatgaagtctgctctcataataggtcacctaaattaagttagacataacattatgggccacaattattttgaataattttggtagttattgttaggattgggaagcctatgaaaacactcggaaagtagcagagtggtagagttgaattatatttcaacaccgatagaaccactaggttcagtgtaattaaattttcatgatacacatgtatatagttaaatcattgctagtcagttaaatctagaaaatacacatacatgcacacacataatttcagatagatatatatgtgtacttacatatgcacacacacacacccttatataatcatgaagataagccctttactatagcacttttatcatgtgattttcataaacctacatcaaaaataaggagtgaacaaaattcaacattagaaataaatggaatatttaacatacttaaggtgaccatactgagcatctgtgtagagcagtaaggatttttagtatctaatgcaagttaaaacccaaatttctaaagcatactcaataggtttgtctcatgacatttacaattctttcaaatctttaaatgggagtccatttacatttctgcaaaacaatttaatttatcctactttcaaagctttgtgccctattatagtataataatattactactgatatcatcagttgtattaatgcaggaattaatactataatcactatattggtgattggttcaggtcttaaagacatagttcaacaaatttgcatagcattcaacagattgtgatgactatattgtagctttataaacttgaaaatcaaaatccactcggaatgatttattaagataatcgtttgtactcagaattttataaactgctttttaaaaatttgcctatgctgaattttcttgtttttcttaggaattttgcttcctccaaattcagctctataaaatagatttggtgctatactaagtgcatttctgttttacaagattactagaggttgatcttccattatttcagttatatacaatctgatacaataaacttactgatatgaaaaaggaattatactctcatttatgagaaaactatgctccaacccagagattctattcagataaatccactcatgtccacatgttattaggtactaaattacctttaaaataattcagtaatttgaaaagtagaagatttttattaaaggatttttagagcaaaagaagaaacataattttagtacaggcaactatttctaacacgaattcattgatctagaaaattactttaatgcacatatcaatatacaagccagttgcttttatttcagcaattaaaaatatctgtgaatttctcttgggggttataatgagaatatataagaaattttcatagtaaaaccataattatactttcattattgttatactagtaaaatgaagttttaattaataaaatgttgaaaacagggaaaacaaatcactcattctaggcttattatagtcttcattgagaaaaatacatctttaagtttttttaaatgataaaacagacttagtagccaaatagtttaagaattgaaaattaaaacattgtaaatcttaaggaaaatatgacacacaaactctcttacacacacacacacacacacacacacacagagtgaaagagagagaaagataatgttatttttatgtctccaatttgtgaatactactgaagtcaaatcaccattttcatttttaatattatttaaaaacccatacctgtcatgtctggcataggaacttaataacttattatttgaatgaacagttgaatagaacatcatttaatgtaagatctagtttgaaattcccatcttgccattctctagctgtttacttttagatgtattacttatctttatttatgttgttgacaataacatacaccttgaaattatttctgctctttaattgtgagagaatatatttttgtgcaccacagaaatgtaatatttcaatataagtgttaaggcatttttgataaaatattagatttctaatgccttacataagtaaatactcagtgctaattgtttttacttcccaatcctggtgattatatatattttttgtaaatattaccaagtcaaaagagaaaaatgaatcccagttacctctaggtatatggtatttgcaaaacagaatagatgtctgacacgcctgaaagttctgctaaataatatgacttaatttgatatggtctttgaatcacaatttaatgcattcctgtgtatttgttcccctagtataaatcaggttatacattatttattcatgtttccttttaaaccgtttcaaattcattgcttgttatatttccagaatgtacataaatatgcatagtatttctttctcttactttcatctacttatgcaaatttttcattttgtatttcagcattatcattttcataaataaattttttatgacattctcatggtattctaatatatctacttgtacagaaaacatttgctatggtttttaaaaaattattattattattattattattattttgaggtggaatctcactctgttgcccaggctggagtgtcgtggcgtgatctcagctcactgcagcctccgcctcccgggttcaagcaattctcttgcctcagcctctggagtagctggaactacaggcacatgccaccatgcctggctaatttttttgttttagtagagatggggtttctactcatttgccaggctggtctccaactcctaacttcaggtgatcagcccgccttgggctcccaaagtgctgggattaaagcatgagccactgcacctggcctgctatattttaaactcaggttttcatggttggttcttctgctctcatgttttcctatattcctctactattctttttacctcttactctttctcatttcaatacacctgatttaaagtaaaattcggtttatgaagagatcttccacactggcattatttaatagaagcatgtaaactcagtcttcaataagtactttctctcaaattgtctaacatgtaggcaaaccaatttaaagaaaagctttttatgtgttccagtatagagcagtgataaaagccggtctgtaccatcagaaataatgaacaattttcgtgaagcaaactctaatgtcaaagtggatgaactcacagatattacccttatctcattttaatatgcataggtatacaaaatatgcatacgtaggtgttatattgtcttcaacacctcgaccagtgaacagtacaatcatccattatgacttctgtgtgagggcaaagagaggcgacctaggatattcatatgggctgagcctaatttggctcctgccctaaataatggtagcatgaggaaaacatttggaaatgtttagggggaataaagataaaagcaacattattagtctgtttatattattttggtgttcaaaaaattcgcctgttgaaaagcattatttacaaatgatgccattgtgtttcctgtttctcaggaagataaagaagaatccatatgtgtatatgtggatatacacacacatatacacaattttaaataaaaatgctcattttaaaaaattattctgaatataacttacatggtttggctccgtgtccccacccaaatttcaccttgaattgtaatccccataatccccgcatgtcaggggaaggaccacatggaggtaattgaatcatcatgggagcagtttctcccgtgatgttctcgtgataatgcacgagatctgatggatttataaacatttggcatttcccctgcttgcactcactccatcctgccactctgtgaagaaggtttctcctttgccttccaccatgattgtaagtttcctgaggcctctcaaccatgcagaactgtgagtcaattaaacctctttcctttataaatctcccagtcttgggtatttcttcatagaaatgtgagaatggaataacacaataatcaacttatcttttatgtatatgaggtcacacacctcctcctgttactttgctaacttgtcaccctctcacttagcctcactctccctttctcctaacactgctttagtttccttttacttctctattatctcctctgaccaaaaaatctttgcataaattttaaagacacactcttcatacactttatcttcattgtgcaacacacaaagatctattggacttcagcaataaacaaagaaatccatcctgccaaatgtaagtgacagcatatgctttcttttaagacaaggagacttaggacttgattagatttaattgatgttaaatctaggggtgaaattttgctttaagccattgtccaaatacaagagagtactttacagtataatacttaaggataattctaagtattttagggccatgagtctctatggggcatatttttggtcaaaggagaacttgcattctcctgagttaatgatttttttttttaatcaatgcaatgactgttgcagtcagtagtcaataaaataaagtttatttttacacaactttatatttgtaaagctactctttaaaacaatcttaccatgcctaaagcctctgcagttttgcgctgagcatcttttattatttcttattttattattctgttctcatgctgctaataaacacatgcatgagactatgtcatttataaaggaaagaggtttaattgactcacagttcagcatggtcgggaggcctcaggaaacttactatcatgccagaatgggaagaaaacacatccttcttcacatagcaacaacaaggagaagtgcagagtgaagagaggaatgccccttacaaaaccatcagatcttgtgagaactcactatcatgtgggcagcatgggggtaaccaaccccatgattaaactacctcccaccaggttcatcccacaatacgtggggattatgggaactacaattcaagatgagatttgggtggggacacaaccaagccatatcacctatattttaaacatttacagatactatattcccatcatatgtgtatcacaaatcaggatgggaactgcatatttgctaagattattattcaatgaaaaactgagtttttatttgtttatgtttttattaggtgcctttatctacttagttattttaaatacgaaaggagctaggtaggtagtacaacaggcaggctcacaatgattgaactggtgaagatatagatacgaaggactaagtaacatctagtggtccaattggagttgatcaatatgataaagaaaaaataaatatttcttaagcttccataacacttaagtaatgaataataatttcagaataaagaccacaattatttaagtgaaatctgaaatgcgagttaaagtgtacacttgtttaactctcataatagtttttatttttattttcatttgctttgttaatgctgccatcagaaaaataagggtgtgactagtaggccgacatgtacattcaaaaagggctgtgcgtactggacaggcaatgatactactgaccttaaaatagtgtacttattcagagatgcttttcctgaagtgagaaaacactggagctagttcttcccactcttgtcctcaatctttctgttgaatcaaagcaaacattcatgaaataattgtctatagaacagagaaaagtctactgggtcacaatgaactttatacaacaccattgatactaacttatatgtcataaacaataaaacaagaaaaagatttaaaccctcttaaataccttttcttaaatcctcttatggacaaatttcttgaaaactgttggttacgcttagtatcttcatttgatcacttcccaaaacattgccttctgctttctcttttcattttttcagttagcaaagtccctcaggcatatgttgatcagtcctcctggatatgcttctgatcttttataaaccttattttcctgcaacatttgagctgtgaaaataatcttaatttttttcttgcctttagatatgtgattccctctaataatcaactacttcagtgtccttctccaatagctgctattttgatcatgtatccctgtatctgttccctcaggtagtctctttccatacagactttgggcttaaccttgtgacttgtttcggccaatgagacaataacaaacataaagcaagagggaattggaaagtgcttgttccttggaccatgctcttgggacccaggagccatgaaatcaagcctagtcaccacctgtcaccccagctgacggccagcctatccccagaagccaagtccccaaaagcagatggctggcaactaactgtagatgcattaagaagcacagccaagatcacaagaactggccaatgaagcccagtttaaattgctacctatgaacttttccttttgtgtcggtacttgcaactaattaagatggcatccccatctattctatcacgtagctggaaaaccaaggtcatgctcaatggtttcctttccattctgtccttcatgtaattggcctttaagtcttactgctatttttaaacttgaaattgttttagtactgaactattttatgaacttagcatatatttgtcattatctgatatgaatttaggtactctctttccttcctttaggttctatattctactttctctttcataacaccctatttctgattgtctacatggtgcaagttatgcaccaggccatgaacacaatggagagtctatttcaaatactttattttatttgttacctaaagtcttctgaaagcctttcatagtccttcttctaagagagaatgtagaaaatgagaaaatagtctatttttgagggatttttaattataaaaattaaatcaggaattatatctgtggttgtttaactgagatgtaaaacctccatcatcttgattctttgtttaaccaaagactgtttgcacagcttgcaaataatacttctgtaggaaattaaatctttataatgcctctgtctcagggccatgttttgccagtgttttggagaccagactttctattttctttcacaaagctaagtaatacccacagaatccttgaagaaatttaaaattaacaattagaatacaagaaagaaaaactgtaaaatgtttggcattggaaatttatgtgagtgagtgtcttttctaaacacacctactgtaaatgttatgcacaggaagcattttgaaatactgccaacattttttagccacttatgctttgctactttgctcaaaacgacatgccctttccaaagtaatcatggaaacaaatgaaaacatggcttttgcccagcagccacttagtgtagcttttggagttgattgagtatataatagaacattcttaatgctgactttattaaaacaacttctatcaattattatactatgttatttgtgcttatgcactttgctatttcttttcatttgaatttaatgtggtttactcataggaggtgttcaataaataatgttagaataaatggaaattaacaaacattatatgatctctgttcattttttctgtaactttttaactcttttgtaaacaggaaatatatctactctgctataatgaatgaaggaaatatatagtttcagaggctaagaaatacactccatttcttgccgagtgagatggctcatgcctataatctcagcactttgggaggctgaggcgggcggatcacgaggtcaggagatcgagaccatcctggctaacacagtgaaaccccatctctactaaaaatacaaaaattagcctgtagtcccagctactttggaggctgaggcaggagaatcgcttgaacccaggaggtggaggtttcagtgagccaagatcgtgccactgtactccagcctgggcgacagaatgagactcagtctcaaaaaaaaaaaagaaaaaaaaaagaaaaaagaaatatactccatttctttcgaatctttctttctctccttaaattaatgtattgcttagaggagaaaacttgcttagaaacaatacagaactttagaatactgaatttggatacaggtaataaaaccaagtcttagaaaagtgatagccactcccctgtgtcaacgtaatcgagggtagggagattaaagaagagagaaggaacagctacatttaatttaatcatattgcattcttccaaaagtacatttaaaactcaactcagcaaaaatgagattcagtaaacagtgcaaaacttaagttttaagttatttttgtcttagaaatttttatcaaaacagggcccaatattagtacataaacaaaatgtaaatttactctggtaatatgccagttgatgattaggtagtttttctattcatataagaagataagtaagaaataaccagttttcttacttcatatattcagacacttttttgtttttatcttgaaacaaccagcataaccaaggattagatttatatacttaagataaaactcttatgtaagaacagcagagtttataagatttggttaaatgaagtagcaaatgcacaaaaataagccattaaaatagcttaacagtcaactcaaaccactgatgagcactatttacagataagtgtatgccttacttctcaccaacacttctgcttcttatttggcatatgtccaagtttctgctgtggtaacatttgctcctgggaggagatgaaggaaaaagggtccataaggttcccattggtccagacagtagaaacatctgctggattcatcagcagcttgctggcccaagtcagtagggagagttgacgcttatcaaccctgccatatgagtccatatttcctgtgtcctggagctacacaagctaattcaagaaaaaaacgaaagaagtgcattacatgccaaaatttcctcattacataagcattatatatttttaagtagctatcatggtattataaattatgagtttggtactgatgaaattcaaactgtaacaaacagcagagtttactggattatcttatcattaattaggtcgttttgattaatgatggattctaagcatttagaactttgcttagagatatttgaccctcaaacttgagaagttggttattgtttctctttggtgagaaaacatttgtcagaaaaatatgcaccacttttttttaaagtacgatcatctttgtaggtcactttaagattagctggtcaatgactttaacaatgggacttgaaattacagcctcaaatgtgagcttaataaattgttactaaatataactattgatctctctctcacacacacacacatgcgtgcatgcacgctatctcacacacactgcacgcacacacatttgtcatttcaaaagtaatagttgtattcaaaagtgtatctttattcccatcttgctcccaataaccagaacacttggaatttcctgcagttgtcctctgtatctttggctaattctattcaatgcccttaatttgaaaaatctgtagcttccgatgatttatttattaaagtttttagtaacaactaagtcactggaagaaaatatggatcaatttttaaaattataaacaagggattgctatgaagcaataaggctaattttttattataacttctttgaaagaggaattttagtaatgacaatgcagttgaaattttttaatggactgattttagaaatacaacactcagtttatatctaaatttgagtaataagaatcaggtattattaatatgacagtgtagctgagaagaaagaaagagatctaaatatatttatctatctatctatctatctatctatctatctatctatctatctatctaacacgtttggtttcacatctgttaaagcatatgagactagcacattgaaatgaaaatctattgttgcacaaagtgtacacagaattcatgtcataacttatttagttctaatccgatatggatttttgcatctatgttcatcagagatattagcctgtagtttttgcctttgtgtgtgtgtttctgcctggttttggtatcagggtaatactggtctcataggatgagtttggaagtattccctcctccttgatttttttgaaacagtttaaatagaattggcattagttctttaaatatttgtagaatttgacagtgaagccgtcaggctctgggtttttcttctacaggagactttttattgaggcttctatcttgttactttttattaatcttttcagattttgtatttcttcatgattcaatcttggtaggttgtaggtgtctaggaatctgtccatttcttctgcgttttccaatttattggcatatagttaacataataaactctaatgattctttgaatttctgtagtattagttgtaatgtatcatttttcatctctgatttcatttacttgggtcttttttctgttttcctcaatctggctaaaggttggtcaattttatcttttcaaaaatccaactttacattttgttcatcttttatattttttagtgtcagattcatttatttctgctccgatctttattatttcttttatgcactaattttgggttcagtttgtacttgcttttctacttctttaggaaataagacaaataagtacaattttaagcatgaatactgagactaatctgttattggaattattagaatagcctgaacctcagcagatatactaagcagaaatttgattttgtgttaatctgaatattgtagttgcggtgcccactttgctagcatagtagcacaattctaggtttcatggatacaataatatccatgaaacacaccaagctttatccaataccaagtttacctgaaagtcatataagacaggtgatacaacagaatgtcaccagctagcagaggccctgggactccttgaaatgcttctgaatgtgcataatagccatttgtactaaagattagactgagttagcatgagcaacctcagctcagggaagcttccatctttggagtctatttaagcatttttgtcttgctagtgacaccggctattcgaaattcttccatcagcttccattttcttgtacaactaaatctaatcaatactgataatttattatgcaataaacaatctcaacaatagcctgcaggcacttagcctagtacatagcaacttcctcagttctcatttattttggatccagtacaaatctatgaatgatttgaattgcaaagatgattcaaccaagaggaaactgctcaggagttccggatactagaggaaaggtcaatgattcgttattagccctttcctcccaatatgatagtgaagtgaccattggctttgctgtgaatgtattttttccaggtatcattttgcaactattctccagaatctgcattcataaatttaaataattaaagatttttacactttcaccttaatttttattgaagtttaataatttaaattaaaaacacttcattataattttctaatgaacagattaaaaatgtagtaatcccaaaaaaggatacaaaaaaagtattaattctcagtttgctttatcagaagtataatttctttagcaaatttatctgtagaaatctatacaaagtaccaagtttcattttaatatgttcccacaacagtttccactaaactctcatagggtaatgttcccctagatctaatgtggcactacaaagggcttgaacatcaaagcatgcaaacatggacaagatgggtgaaatcaacattaatgaaatctttgtgcattcaaaaatgatcaaacagtggaaaatacatccttttaaccactgtgttattttacattgtttttaaaaaagatagtttgttcgttagggaatattccaagtttatttctatgttactacatattgatcaacacttaaataattaaggtactatcatttgaacacaatgtttatgtgttcaaaaatatgtgcccaccatgtctaaggcagtatcttatgtctgtcagagaatgaaatattatgtatatgtatacctctgctatcaagagctttatacgtctcacattcatatatcaatggttaccttggcgataaaaactctggttttggaaaagaaaattatttctatgatattagtcaaaggagaagttgtatttataaagtttatatttcacaggggaaaaacttaaattttgtgttactgcatttttgtagtctgctgggaacttgttcatttgaaagcatagtattgttattcactcaaagaaatatatatttgaaaaagaaaactgttttaaatataatatttacacccataggtggattaccagaaatattttcttttctcccaaaaaaatattgcagtttataagccagcaataaaataaatgaccagcatcattaataacaaggaacttaccaagccaatgccattttagagtggaagtaaaggacacatttttcatcaaagagtgaggaggatgtgagcatatagataacaatcctgttttatacaaactcaagctagtaaaagatgggtctccatttaataggaagtattttgcagtgtaaaaattaaaatcacgaaattgttacctctgtaaatcaattatcccaggatttaatggattctttaatattttctcaatgaggtacttgattgtaaacacaatttttacaatgattcatcttcaaggttaaaaatgcttgacttagggatcatgattaagtcattccttggtgttggacaaggggtattggttccagaaccctgactataccaaaatccaggcatactcaagtcccacagttggctccgtgaaacctgcttatattaaaagttggccttccatatatgtgggtttctcatcctgcaagtaccatatgttcagcctgtatttgtttgaaacatatgcctatataaatgatcctgcacagttcaaacccatcttgttcaagggtcagcaaattagaaaacagcattttctgataatgtaaatgagtcatatcacttctttcaatgtcttgccgttgtgtgtagaataagtgtaagctccttattataacctaacaagtcctgcatgatctggccttgaacttcttttctgcctcatcttgggctataccattgttgtctgttgtgtgccagtcctattgatatttttcagttctttcaacagctaacctatttcctgcctctagctcaggacttttgcattagctgatttactttttggaatactggccctggtgtctaacattcttgacctcaggctatttttaaatggctgactgtttctcgccatttaactaagtctttatttatgtgtgcttttttgttttactttccttaggctgttagttctggtgggcaagaatcatttctagctgttcacagttgttttcccaacacatactatgggaatcctgttctggtataaaacatacatttgttgaataaactaatgtcattgaggtatattttatcagtaaaatccactaaaaatgtaaaagcaatttcaggaaacattgttatatttatagttcatatcaataatataaactgaaattatacactattaagtgacatatgcatatgttggatatcactttctcttacacatattttatatctatgccattttgaaatttcttattacattccgtaatttaacgagttagaatccaaacatctatgtagctattttacataaataactttatttagtgcaccaatgcaattattttaattttttacagagaagaatacagaaaaagaatattaatgtagaagcaatttagataataatcaatataattttatgcttccagagtatgcatataacaggtgcaatccaaaataaaaataacgtcaaaatatacatacagtaagtcaaataactagcaacaataagtcaggaaacaattgatttgagtttgaataatttttttttttcatttggaattaggaaaaaccagcatgaaaaccagactgaagtcctagtatcttctcaattcataactttccttataatctttatcgtatttggctagtcatattttctatattcacatatttgaaaaaattctgtatttgaaataaggtttttaatgatacttgcctttcatagatttttgtcatttcatttgcttctagaaatgttattaggaatttcaatttttattgaacttatgtaatttttaaaatatattataattcagtattattagtgactttctttactatatcaaccttctaagacctactggatgaaataaatatatacacacatcatttcccttttttgagcctcagattgaagtttttcccagggacttcaattttaaacagttatgtcccacccagtcaattgcctccagaaaattgattattgtatgctcagcactatattcctcaccctctctccagaagagtcctaccatctgtgtgttcctttgcaggatatttcctccagtttgacatctcaatttagaatttagtaacatgattgagcttcactatgaaccagactgtgattgtggtcataaatttcttttctctggaaggctgcctctcaaatgttcatcagttagcaagtaaagctagtcagttctagatcttactcattcaacctgaaaataatattctagaaagataaaataactttatgtatacataataattaccatgtaagcctgttttaaaatcacagaaatcattttaaaaccctcttattcttttatattgccttgagagacatacaattttcttttcattttgaaattctttcatttgctttggattctttcacattacaatatttgaagatacatttgtagaggaacaaaagtagcctggtgaatataaatgagaacaactcatcaagttcactttttccttgaaaaatcatgtgttcattgaataaactatggtttgaatttttgagaaaacactgaacattttatggagtgaattaaatatggataaattaataaaaacaaaatatattttaaagtcttcattacaaaaatctatttttgttatgaagccatatattcgtatttattctatttgactaattgcatggtgtgtaaacaagtttgtgttcattttgcattttggcagggtaataagcagaaaagctaagaatagaaagaattgactttgtacacatacaagtcaaaaaagtgttgagaactttaaaaatctgataatgttttaagacatgctaaagcaatgcagccactgggtaagaacataaagcatcctttaaataaagtttcctaggattttctaagtgctctctgaagtttgggatattgtaaattaagaaaaactttagtgatatggccgagtaaaacaaaactaatgggagaaattagaaaaatgtattttatatagaaataataactgtgctgggaatattaaagaaagctgagatatcacaatcatgcaaaacatttttgaaatggaggggaagacaatgatgttatgtttcacctacattacaaatttctccacagctggctttgatcctgataatcaagaatttattccaaatataagtcctgtcatagacacagcacatggtagctagttctggtataatgttatgtgttatctgggtcacctactcacaggtactgtataggtaaactggaaacaatccaggggttatcccataagttccctggtctgctatgagcagcctagaaaactattatcacattctggaaaaaagagaggtaaaatttctacaggagaattataattctctgggtcaggagctgtgggagccactgtaaatctgaaggagccttttgtcatggatcagaagccaacaaagaactagggccaagctttgggtacacaagagtttctgctcccagagttggtagcagaatgggctgctcacaatggccatagtgaacgctaggattcggtctacgggattgtaagggctgaagctgccaatctggcactgttacactctgatatcaggaggcgaaagcccttccaaccttttctggccttgcaagacccagctgccagccagctttgtttcttccctgccttggtctggcagttgcaatggaatacaggtctccaaagtacttcctgtctctgtggaaactggcaagcggcaccagactgatggccatgctccacagtggctgggcagaatggtggcacagaaggtggataccaggtgttgtactctaaaaggcaggctgaattcaaatggatgaggtagaatcaaagaaaaataaaatattatgtggttgcctaggacagcagacaacttaaagtctttcagacaaacctaaaagctgcaataaaatgatttttaaaaatgactacagaattctaagtatttgaaagaacagaggggcattccaaaagtggaaacattttgcacttagttatcagtcttagtttttcctctaatttcctatctcacatgatagagcattcattgcacttctctggagaattataagccggccttaatgacatttgtgcttttcagtccagtaggctttagaatgcaatatgtgcttcagtccacacaactactgagccacaactttcacattagaaggttatttgtttagaatgccttcagtaatttagtggaagtaatagcatgctatgtgtgcatttagatatatttttagactctaatttaggcaacaagaatgatcttgaactttctaagacacaggttctttgtataaataccccttaccagttgatggaacagatgacggagagaggggtggggagggagagagagagagagagagagaaagagagagagagagagagagagagagagaaaagaaagagagacagagagagagaaaacaaaaaaaaactgaaaatagttgaggggaaaaacttaaagaatagtaggctagcattgtacttcatttaaacatgtgttgcctctttcatcattccttgttgagtttttgttgttgttgtttgtttgtttgtttgtttttgagacagactctcactttgtcacccaggctggagtacagtggcacgaacttggctcactgcaagctccacctcctgggttcacgccattctcctgcctcagcctcccgagtagctgggactacaggcgccctccacacacctggctaattttttctactttttagtagatacagggtttcaccatgttagccaggatggtctcgatctcctgaccttgtgatccgcccacctcggcctcccaaagtgctgggattacaggcataagccaccgcgcctggccagttgagtgttatgtttaagaattgttaacttattttgtatctcctgatccatttagcatttgtgttttcacaaccaagttataagaggaccttaatataagaacagtatttttgttaaatgaggttcttgagagaacaaaaaaatattttaaaaacaaccaaaacatgatgtatgctatttgattcaggtgtctatgtctctgttgaattaactaattttgtagattaagttgacagttttcactaaggacaaatatatgccaaaatgaagggtcaaaatacttgatattgtttatcttatgagacttttatactttattattgaaaaattgtgtcttaaatattcttaacatcttgttttttgtttgttcctcttcactgttttaaatctggttcttccttcaaaaaagttttgcttatttttaggaactaaagaatagtgagaggacttaagttcctcttaaatagctcacaaaatttgatcattgaccctccaaaactaccaactaactcacttcctctcaaacatgcaaagcctcaacctctgcctgtctctctaggtatatctcgggtgattattgctcttagagagcaagcactcatgtgcagtgtgcactgatccactgctatggccacatttaatctttagcacaggaagagagatggagaaaaccattgccaccactcatcatccaatcaagagatagcaaggcttgaatgatgttattttcgaaagcagagtgatgctttgggatcagtgttaaaacatgcatcatcctagtctctttcaacaatacttatttcaaagatctctctttactacttcgcttattgcttttatgctctaaggttacatcatagcctatcacagaggtaagagtggccataattttagaattttcttctttatgtcctatgtgatagtgtgctggattcttggtggttagacagtgaaggcaccatggaacatttgagggagggacagctcttaactaactgaggtcaacaggagtcaagactcagttcacttgattctgaacttgataattcctaatgtattcaaaaaaggtttgaccattctttctctaagtatatgacagatggcaacattgaaggaataatggcaactgctcagtctgctatttaaagataggaccaggagagttattttttcaggatattgaatcattgctcttcattaaaatgtatttcatggcaataaattaagaacattatttctgcataactcctgaaactaacttagatggttttcaaccactggtgttagttagagagaactaaacttggcagccaaagaaaaactagcaattcaagatcactgttcacagagtagaggaaaaaagggagcctatttgaaggatttttattggaagaattgtgggtacgaatggggaaaaagctaaaaatacgcacagaagcaccaaaaagagatatcaaggatgggtttcagaggtgtgctgtaaatgtttaccaacatgctctatggagaaaatcattgagctgtggtgtttgccaacttccctagttaaaatacaccctctgtggtcagtttcaagctgccaacctatgtcactgagcatgaattgagacgagtttcacctacttgatgctctggagctggtgtgagccaactccagcacattaagcttttacttggatttcaaatgttcattctcttattaaaaataggtgtaaaaggtctaaatgcatctttgacatgtttgactataaactatgttttgcttttatcacagttgtttagtcagaattgaatttaccttattttcctggccactgaaaagtctctattaaaatggatgttgatgcaagatttattggacaaggaagaaaaggtaaaatactttcaaaatcacagaactgcatctacctaaaaaggcttaggtagggcttatacttaatattcaaaaaatgttaattatatgcctatttttccctttaaggtgcataaatatggcatagtcctgtcatttcaggtcttattttaggggtttaatagtcagatatatctgttctggatcaccatctgttttatcttcatacatataatccttatgtattttacttataattttaaaaagtcttaagatgtgatactaatatatctttaaggtttttatgatttaaattttccatatattttctcagtgaagaattagtctttctttttggccttccatcttgaccatgaacaaatgcatgagacttaagttaccttggtcattctactgtcaaaagggcccctgcaaatgccagccattgttttaagatggtgcatttactttagatgatgaacaccttttgagagcttctatttactatccaatatggtaaacagtgtagctgattaaaagataagtaagatgtctcagttactataaccttaattggattagaatcaagtaagggagagagatatttacacaaatgataagaggaagtaaacactagaaggagaggaagaaaataataaatgtaacttgcttggaaaagtagccagcttctaagattcccaactgaaagttttgtttcttttaaatcctgtcatatgcttgtttgataagaatgactcctctgaaatctaggatggtggtgagcttagccagacccagtgttattttaaaataagctctcgatgatatgaccaatgtatattaaaaatccttgtagatggtaaacaagatccatactgtaccatctgggctgttttcttcctggtcattacactctctcctaaagtatctaattactttgcggactccttagtaagcttctctttctttacccatccttcagatgttgattcatacaaagcaaggcacatagtaggttctctatatagtaggtcatctatgtaattattgaattaaggccaagatttttaaattttaaaaaatatattttaattgacaaataataattttgcatgtttttggggtacaatgtgattttttgatctatgcaaacattacaaaaatattccatcaagctaattagcatattcatcacctcaccaacttaaccattatttttgtggtaagaacattaaaaatctattattttggtaattctgaaatacacaacatattattattaattatggttacctggtagcatactaattttgctaatttgaaaaattagtaacttctttggaaagactctaagattgaatggagaccttgaaccatgaagagttaaaagataaagtagcagctaactcatgctctcttcaggttaaaatcagaagtaaaaggcaattcatagctttgagacttttgactatctacaacaaagcttttgaattgattttggaaaccacatatcccaagggcatttaggattaggagattctccacagaagcttgctctgtattgggaaaaactaagttatttgactgcagggattttaggctgcgggtcctagagaactaaaatcatacttcaaagtcagaatacatgtggggagaagatggagggaagctattctaatctccaacctggaagaacgaggtataggtaaactagtgtatattaaatatctggcatgtagaggactctaacaaacattagtttctttcttctatggtccagtaagaaaaaataaattataaaagtaaggtatcaataagataagatatttagggacagttagttatcaaaaatacgttatcaagaggataagatatttaagaacagttagtattgacatcttaaatttccaatttaaagtttcaaatggtgactcatttgttttcattgttgtctaatttacatttaaacaaacagggataaagcctttgtgaatagataagaatgaaaatgttgaactttcagaacaaactccaaatggttcattgactttgtttcaccatggaaaaatcacttcacctcccagtgtcagtttgcccatctgtgaaatgagaaggatgatattttcttatgggaatgttttgaaaattgttttgtaaatgtagtggatgagattttcgcaagcatcactgctctttttccacttatttaaagaagcaaacagtcttatttatgtactggttgatcatcaaaatgtcatctgggctgaaccatgtatatttttattagcaattgcgtgctttttattgcttaaagaataactccctgattgctcaatttatgcattatatcaatatcagggacccaagaaaagtgttttgaaaccatttggagcttcatatttctgagctcctaatctctggtaattatttcttctttctgtcttacatcatgttttctctgatgtggtttttcgcctcacctcacttcacaagattgatagttctccatgtcgccttgctagaggtcacctctgagctgaaggcaaaacacatcccactgtggctcctgttgactttcaagtcaactatccaggaatttattccagacattttctaacctcaatttaaaaactccaccctaaaaattacagggcgatggcaactctgagaggttggcattgaggagacaaagcctctgatatcagattttttacttgataggcttaattttgtaaggtgatcacgaacctctatgcttgtgtcatttaggtgtggaaagaaattttccccttcagaatcttctgtctcttatggtgccaatcaacacacttctgggtaataagatttttttttccagtgggggaacagcgcttatcaagcattttatttattgagccacaaatagcctgtatttgcacaataagaaaattacttctctggccagttgtggtggctcatgcctgtaatcccagcactttaagaggccaagatgggcttatcacgaggtcaagagatcaagaccatcctggccaacatggtgaaatcctgtctctactaaaaatgcaaaaattaactgggtgtggtgacacgcacctgcagttccagctactcgggaggctgagcaggagaatcacttgaactcaggaggcggaggttgcagtgagccaagattacgccactgcactccagcctggcaagagagcaagaatccatttaaaaaaaaaaaaagaaaaagaaaaaaaaaaagaaaattacctgtccaaagcagaagtgcccagttttaggaaaatctttttgttacatagcaataaacattctcttctataaagttaggtggaaacttgttattttttggatagaaaccatctgagttttagaactttataattttttttttaacttcaagttctggcatacacgtgcagaacgtgcaggtttgttccataggtatacatgtgccatggtggtttgctgcacctatcaacccatcatctacattaagtatttctccaaatgctatccctccccttaccccactaccccaacaggccctggtgtgtgatgttcctctccttgtatccatatatatgttccattgttcaactcccacttatgagtgagaacatgcggtgtttggttttgtgtttctgtgttagtttgctgagaatgacggtttccagattcatccatatccctgcaaaggacatgaactcatcctttttttatggctgcatagtattccatggtgtatatgtgccacattttctttatccagtctaacattggtgggcatttgggttggttccaagtctttgctattgtgaatacagctgcaataaacatgtgtgtgcatgtgtctttatagcataatgatttataatcctttgggtatatacccagtagtgggattgctgggtcaaatggtatttctagttctagatccttgaggaattaccacactgccttccacaatggttgagctaatttctactcccaccaacagtgaaaaagcgtgcctgtatctccacatcctttccagcatctgttgtttcctgactttttaatgagtgccattctaacaggcatgagatagtatctcattgtggttttgatttgcatttctctaatgaccagtgatgatgaactttttttttcatatgtttattggatgcataaatgtcttcttttgagaagtgtctgttcatatcctttgcccactttttgatggggtcgtttgtttgtttgtttgttttgtaaatttgtttaagttcctggtagattcaggatattagacctttgtcagatggatagattgcaaaaattttctcccattccttaggttgcctattcactctgatgatagtttctttcgctgtgtagaagttctttagtttaagtagatctcatttgttaattttggcttttgttgcaattgctttggtgttttagtcatgaagtctttgcccatgcctatgtcctgaatgataacatctaggttttcatctagggtttttacggtttcagatcttaatgtttaaatctttaatccatcttgagttaatttttgtataaggtgtaaggaaggggtccagtttcagttttctgcatatggctagccaattttcccaacaccatttattaaatagggaatcctttccccattgcttctttttgtcacgtttgtcaaagatcagatggttgtagatgtgtggcattatttctgaggactctgttcttttccattgctctatatttctgttttggtgccagtaccatgctgttttggttactgcagccttgtgatatagttttaagtcagttagtgtgatgcctccagctttgttctttttgcttaggattgtcttggccatatgggctcttttttggttccatatgaaatttaaagtagttttttttctaattctgtgaagcaagtcaatggtagcttgatggggatggcattgaatctataaattactttggaaattatggccattttcacaatattgattcttcctatccatgagcatagaatgtttttccatttgtttttgtcccctcttatttttttgagcagtggtttgtagttctctttgaagaggtccttcacatcccttgtaagttgtatttctaggtgttttattctctttgtagcaattgtgaatgggagtttgctcattatttggctctctgtttgtctgttattgtgtgtaggaatgcctgtgatttttgcacattgattttgtatcctgagactttgttgaagttgcttatcagcttaaggagtttttgggcttagacgatggggtgttctaaatatacaatcatgtcatctgcaaacagagataatttgacttcctctcttcctatttgaataccctttatttctttctctcgcctgattgttctggctagaatttccaatactatgttgaataggagtggtgagagagggcatccttgtcttgtgccagttttcaaagggaatgcttccagcttttgcccattcattatgatattggctgtgggtttgccataagtagctcttattattttgaaatatgttccatcaatacctagtttattgagtgtttttagcatgaaggggtgttgaatttcgtcaaaggccttttctttatctattgagataatcatgtggtttttgtcattggttctgtttatgtgatggattacatttattgatttgagtatgttgaaccagacttgcatccccaggatgaaatgacttgatcgtggtggataaggtttttaatgtgctgctggattttgctggtggttcactccagaccctgtttgcctgggtattaccagcggaggctgcagaacagcaaagattgctgcctgctccttcctgtagaagcttcatcccagagtggcacctgccagatgccagctggagctctcctgtatgaggtgtctgtcaaccactgctgggaggtgtctccacctcaggaggcatgggtatcagggacccacttgaggaggcaatctgtcccttagcagagttcgagcattgtgctggaagatcagctgctatcttcagagctagcaggcaggaacatttaagtctgttgaagctgcacccacagccgtccctttccccaagggctctgtctcaggaagatggaagtttcatctataagcccctgactacggctgctgcctttcttttagggatgccctgctcagagaggaggaatctagagaggcagtgtggaaacagaggatttttgtcgctgcagtgggctccacctagtctgaacttcctggaggctttgtttacattgtgaggggcaaactgcctactcaagcctcagtaatagcagacacccctccctctacgaagctcgagtatcccaggttgacttcagactgctctgctggcagcaagaatttcaagccagtggattttagcttgctgggctccatggtggtgggatccactgagaagacctcttggctccctggcttcagccgtctttccattggagtgaacagttctgtcttgctggagttccaggcactactgggataccaaaaacaaacaaacaaacaaacaaacaaaactcctgcagctagctcagtgtctgcccaaatggctgcccagttttgtgcttgagacttagggcccttgtggtataggcacccgaggtaatctcctggtctgtgggttgcaaagaccatgggaaaagcatagtatctgggccagatagcaccatcccttacagcacaggacctcatggcttctcttatttaggggagggagttccctgaccccttgcacttcctgggtgaagtgacacaccaccctacttctgctcgccctccatgggctgcacccactgtctaaccagtcccattgagatgaactgggtacctctgttggaaatgcagaaatcacccaccttctgccttggtctcactgggagctgcagactggagctgttcctatttggccatctggccggggaatccctggtaataagattcttacgccaatagttccagcataacctcaagtggtgcttgtagtaattattgaatcattacaaaactaaagaagaaaaggaaatatatttcatggatgtgattaagtcattatagtgttcttgcatatgtaaattatccttgacttaatgaactcccttgcttacataataatattttaacctggttctagaaagtcattcttacccatgttaatcatggttatcagacttagcagagtttatcttcagatcatcttgctgaagagaaatttatgtattatgtatccgtgtgcataaattttgattaaactattagaagtgcacttattaagtaaatttattacatgaattactttaacaaattagtaaaatgcttaagaagagcaaaaccttgattacatactgatgatatccaaattaacaagggtcatttaaaaatatgtatttttctgattataaaagaaatatgtattacttggagaaaatcgagaaactacagaaaggaacaaagaagagtattaacctatatcacctaggattaataatttagagtttgaatggatattctacactttttaaagagtactcccactgttttacacaatacattttgtatttctaaaaagagctaaatctacaagaaaacctagttaagtgggattcattttttatttcctttatcagaaattgaatctaaagtttgagtatccatatttcaaaaactttattcaggattataaaagctaccagggaaatattttatgtttcctctactgctttagagagttcaactcatccaaaattatttcagtgctttatcttcaacaatgaccaagtttagtaccgtattaactaatgcaaagcctagggaaagtaataaatataatattactatttgaatataaatctttatgtatgcctaggacaaaaaaagtttcctagaacatgtagggagtacaaaggagtcttaattatatgtcaatgctgttgttctctgaggattttcaattatttttctgtcttttgtaatatacagttttgtcgttgtttggttgttttaaattttattttgcatgagaagttaaggccagtgtagatcttaggcagttaatcattttatgactttcatttaatcaacattttctttaatccccttttaggcagccaagggcagtttccactaacacagaatgtaaccgttgttgaaggtggaactgcaattttgacctgcagggttgatcaaaatgataacacctccctccagtggtcaaatccagctcaacagactctgtactttgacgacaagaaaggtgaatacattttctttcaaatgttttaatcgtattctaaaatatcctaattacaataaatttatttttctgagatgattcaaactattccttttgattaccaaactgctgctgcttgtatttaaacatgttaaatattaaatactttagtttgcaagtcataaacaccaaagataacctatgtcaactttttaataaaataaacactcataattctgtttcgaaaatagttttatgccttctcttaacaaccatttcctgtctaggtaccatattttctcactcttgtagctatgttgtgtatagtttgagtttttttctttctcctgataatataatatgatttttatggaaattaggtttatatatttggaagatgcaatatgattttgaaaagtttaatgattttattttcatgactttgctccgaaactaagaattgtaaaaatgattcacagaatgttgaagtatttcatgtttccaaaataaactgaaattaagtaagaagctgtagtttttaaagttgaattggacttcattaactaatttcaacttcttactggataatagattttgattaaacattccagagaaaaaaggaaattcatcttacgtaatccaagcaaacaactaaaaatgcacacaaatgtctaagctttcatccattattagatgaaaaagtgaatccataactgtaatgaaaatatgagactgttgcttaagatacatgtatattatataggatataaataactatttatatattagctattcttattcttaaaattaactattagtcttaatatattttttaatgaatctgtataggtaattgtaagataacttcaaatcagctccatttaaacaattaaaatatcacatacagtctaataaatgtgctcagtccacctttaatatgtattcattatattttgttcattgttacaatttttcttctttgatgtcctctagatttaaaatgaaatctttagtttgttttaaatattaaatatataatgaaggagtgatgaagcatctaattcatttatttgataaatatttattgagagtccctttgtaccaggcattaaaattagggagcaggaagttcatagtgtctgcctttttagggaatacagtgtagtggaggagacagacaataaagaaacatgcaaatgaaatacattatatcatacattaaaaggggacaagtgctatgcagaagaatgaaccagggataaaggaactgttaggggcctccagggagacaaaatgaagaaacagacagatagatagatagataaatagatagatagatagatagatagatagatagatcaattgatcgatatttattttaataaattggctcaagtaattttggggtctggcaagtttgaaaaatgcagggcaggctggtaggctggagacccaaagagattctgttgcagctcatgtccagaggcagtgtcagggagaatttcttcttccttagggtacttagaggacttcagactttctcataaggccttccactgattgagtgtctcctgtccacattatggagaataatctgctttactcaaagtctactattttaaatgttaaactcatctaaaaaaataccttcacagaaacatctagatgattgtttaaccaaacatctgggaacagtggcccagtcatattgacatttaatataaaattattgacatattgacagttaatataaaatttactgtcatggacagttaatacctaatactcaagtagaactttattatttagaaagagatttaatttgcagtttcagttttctttccaacaaatgaagttctactagttaaaaaaattaaatgcatacacaaagtcactcatagagattaaacaatctctttttgcttttcgtattaattggttacaaatattagtaaataaatatttaaagtgtatgctcaaatataaggtggtgccaattttaaggacatgtctcatttgcttgaaactatgatgcaaaagaaaatgttctggaaaaaaatagacttctggaaatgttcattacgaaactaaatatattattatattagttaatttgtcaacttggttatacatacatatttaaagtaatatggaaaaatattaatttataaatactacttttttccatccctgtgtttaatgaagcaatcttgcttattagcagtttttgaaagtgtagcacactatcaacaacaaatttgtcccaagcagcaactataaacttttataacattagaacattttttgttgttgttcattcatcccacaggtgtataatgacaatctccactttataacaacacttgtactgctttttaaggagatttttaagagtcatgtttacagtgacatctccaatcgtgaggtcaaatcctcaggcacaaagacaaaatctatatgaaatgcccttgcctccacttttagtgattctataagttatcctctaaaaaacatctaaaactagaaaactagaattgatttgggatatttcaagctaatgtatctttcctggagaaaacagagagcaacttgccataaaagatttgcaaagacttgaatataaggcagcctccttttttctgagggataattatgaggagaaaaaaagtcatgccatatttgggaaatatggtaatatattcctgcatctttacactgccttgaaataataaatacaccagttctatgaattgttgaagtatgcactttttttttggttttgttttgggacagggtctcattttgttgctcagggagttcagtggcacgatcttggctcactgcatcctccgcttcctcggctccagcaattctcctgcctcagcctcctgattagctgggagtacaggcatgtgccaccatgcccagctaattttttttgtattttttgtgtagactgggtttcaccatgttatccaggctaggctgcaactcctgagctcaagcaatcctcctgccttggcctctcaaagttctgggattacaggcatgagccaccgtgccgggccaggactgactttacttaattttccgttcccagatgctgtaatagcttagttagattggagaaaagcctatgtatgtgtttgtgtttgtagtatgataggtttctgtttttgatactatgctttttctaactctattgtggttctaaacgtcagttgcagtaaaacaacagagagcattgaagaaagaaatcctttggcaatctaacatacctattccctcatatgtcagtgcttcaatttccttcttctttttttttcttttctcgtcctcactatctgttcccaagagtggttcaatttctatgtgatatcttagttgaagggattcttggacagtaatacctatcaaatgcaagagtttgaaattgaaagcattttaaaagattccatattacaattttccacacatcatcttttaatctgcaattacctaactctcaccaattttaaggcttgtcttgagcaagcaagcattccaagttgtaccagagcctaagtgaagaaggtgagcatgagttagactagagtaacgcatacttgttttactagtgaagactgcacatgagagcaagagagaaaagggaaggaatgggttgtctgtgtcattgattataccatctcctgcaggtggctgctactgttaaagcttcatctatagcctcactcttctttctgtctcagattgtgcttccagtggttcttagccgtagctacacagtaaaatcacttaggggattttcaaacacagtcttccagcggtatgcagtatcagaatattttaattatatctcaaatgattagaaaatgcagctgtgattgagacacttgggtttaggcaagtcaactctctgaagagttctgcatccctgagcttggatttctgtattgataaatgttactgagcatggaaggaagaaaagaagcgagggagggagggagggagggaggaaggaaggaaggaaagaaggaaggaaggaaggaaggatttctgtattgataaatgttactgagcatggaaggaagaaaagaatggaagggagggagggaggaaggacaaactgctcagaaaaagaacaagtgctgatcactgcctcacaaccattactactgctactatgagctccgagaggcatcccgtagcatttcatgctacctggaggtgtaagtttccaagggtcctggctatgaacgagaaattcaggatggcagcccacatgtcatgttagagttggaaaagccttgtttacatgaatttattaactgaataaaaacatgctgtgagtggtcagttgaatcaagtaaaggagaattaggctgaaccccctttcctaggggtctctgtcagtgactttaaatgtgaatattcatgtaatcctagccacttgggaggctgaggcatgagcattgcttgaacccaggaaccggaggttgcagtgagctgagatcgcgctactgcactccagcctgggtgatagagtgaggctctgtctcaaaaacaaaacaaaacaaaacaaacaaacaaaacaaacaaaaagtgaatattcgggaatctcttccccggggagataggagtctagtgggggaattggctaaggtgaatctaatactgtcatatttctcactgaggtaaaataaagacgaaggcagcaaattcaagcttttacaacttttttgccatgtttaatgtgatcagtagcttgtgtccattgataaatggaaaaaataagacctaacaatcaaggatatttcttcacagacattcagctaatgtctggtagtgaagaactttgaatccaggtgtagcttttgccttgattttaactgaaatattcctgaaagcaatggcatttggacgccatgtcattttaaatgtaacctgggcagcctctgccattgatcttggcagcttacttttgttaaagagcagcatgtcatttcaaactattgaagatatacatagattaagacagaagggccaggcatggtagctcacacctgtaatcccagcactttgggaggctgtggcaggcggatcacctgaggtcaggagtttgagaccagcctggccaacgtgacgaaaaaccatctctactaaaaatacaaaaattatctgggcatggtggcggatgccaataaccccagctacttgggagactgaggcaggagaatcacttgagctgtggaggcagaggttgcagtgaactgagattgtaccattgctctccagcctaggcatcgagagtgaaactccgtctcaaaaaaaaaaaaaaaaaaagacaaaaagacagaagaatatattataatcagcattgtccacgagaacattccatgatgatgggaatattccatatctgggctgagctgaacaattcagttgtcatgtgtagatatttaaatttaaattaataaaaatagagtaaaatttaaaaatttggtttctgccacactagacatatttcaagtactcaatatcctcccatgcccagcacttactgttttggaaagcacaattctagatgctgattcactcatcagatgtcataatataccttgtccagttccagccttggctagtagaatatgttatttttaactgagaaaacccttaggctatcataaaaacatgcatcaaatattcaataaatgatttttttttaccatttaaattgtacagctttcagggggacattgtggcacaggagacagagagtcagatctgaatttaaattctgcctttgacaccagccagcagggtaataaaaggtgttcattgacaccccattactggtggttggaccagaattgtattttaacgagttccctgtctgccttgtgtgcacccaaaaatcagaaatcattagcctacaaagtcgaaattcaattacaattccacttcatttctgtacagcctaagtatgaagtctttttctataatacttaagaatctgcaaaaactaaatagaaaataagaatcaagaggaaaatttatagatccttatgggtcagagagacctagaatagatgtagctaaggcaacattcacttgttataatcctcttctctttctttttacataaatcttagcacctctgttataaatagttgataagcatttggaatagagtgggtatagggagacagagcaagtggggagtagaggtcattgaaacaccacataaatgctgtgtggtattggcaatggaaaaaaaaatcaattagatcgtagtgtctgtttctctgcaggtgcagaaggaaaaaaacaattgaagtagcacaatctgatcagttaatgctcaggaaagaacacttcaattccttcctattattgacaaaaatactttgaacaagcatctccaggagcccataacacacacattcaacagatacatctctgtgagcttgtatgtgtttttatataaaaatgtaaaatacatgacttttttgtgattttcttctcaatatttcaacttttaaatttttttaataatccttaaaaatttcctaaagaaatcaaaataaaaatttattaaagacatagctttaaatcattggtgttaattagccaattattctaataattttacactaatactgggaacaatggaagaggaaaaacatgagtaaattgtcctaaaactaagaccgataaagagaagaaaaatgagatgaaccagaattggaggtacaggttctcctggctctatgccaatccatgccacctgactgtatatctccacaactgctatcaatcaatttgacaggctttattaaagattaactgagtaaaacaggtgttgcatttggctactattacccttcttttgttttcttttaaaaatgcagctattatatatctgtacaataaaaatgtgaaattaataatgatagcttatagttatacagtaaagttattagataactttcagcatgtttaccttttgtctttgagttctcaacaatactatacagtaggcattcctattttatatgtaaagacactgaggtttacatatttaaataacttgagtagtaaatgacaaagcaatgaagagacttgagttttctggccaggtgaggtggctcacacctgtaatcccagcactttgggaggttgaggcgggtggaccacttgaggtcaggagtttgagacaagcctggccaacatggtgaaaccccatctccactaaaaatacaaaaattagctgggtgtggtggcatgcacctgtaatcccagctactcgggagtctgaagcaagagaattgcttgaacccaggaggcagaggttgcagtgaaccaatatagcctgggcaacacagaaagaccctgtctcataaaaaaagggaaacttgagttttcttacgacaagtctaattcactttgtgtttcattatgctgaaaaatgaaacattttctcccttccttccttccttccttccttccttccttccttccttccttccttccttccttccttcgttccttccctccctccctccctcctctctccctccctccctccctctctctctctctctctctctctctctctttctttctttctttctttctgtgggaattatagtttctggttctgtatttcaaagtcactctttctgattgatctcttcaaaacatcttatctcatatttaaaccctaccacaccacaatattctcatatgtattagtaaatttcctagcaagtgcatgcatattgaatcgtgttccccttaggaattaaatggtacattgcagttaaagaagaataaatgggccaataatacagatacaggcataattaaggaaactagccaaaatgatgcacacccagaaagtagcgacagtaggagaacatcctactttggtgtctgtaagagaaataaaattaactaaagttacagttatgggagaaggcttctggttaagagctatgactggctgagaagggatagatgtatgaaaatatgtaaattgacatctcttttctcccaacctctgttctcttgtcaattccttctgggctgatcccagatgaaaaccataggtcaagggatcctgagtagcttagtcttctaaggtaaagagtgtggatctggaagatgaacagaaaggaaagagtatagcatatcatgcatacacagagatttctacatacccaattttcagttaagataattccattgaaaatcttgggttattttatgcttatgcttgcaactaccttcagttgcattgcttctctgggaagatatttaatacatatgttaaagtatatgctcatagaattctgttttttttttttttttttttttttggagactaagtctcacttcgtcacccaggctggagtgcagtggtgctgtgttggctcactgcaacctctgcttcccaggttcaggtgattctcctgcctcagcctccccagtagctggaactatacatgtgcaccaccatacctggctaatttttgtatttttagtagagaagaggtttcaccatgttgaccacgctggtctcgaactcctgacctcaagagatccgcctgcctcagcctccccaagtgctgggattacaggcgtgaaccaccatgcctggcctcatagccttcttaaagaatttacttctacttttgctgaagatgaagccattattggcaattctttaaacataaagaaaatcttcggttgtggattgtataattactacatttacttctttaggcctgtgcattttgagtccagcaattttaaataatgataatatatgctataaattttggcagttacatgaataacaacatgttaagctgtaagcatcaagactgaaatgttgacattcaaagcaacatatgcatgcctaaattgtttccacaaattttaatttttggacatcaaaatcaggataatttccatatttgatattatattttagggaaattatatgcctacttttgataatactttctgcaatgttttttgaaatcaaagtgacattttctacaaataagtgctgatgaccaggtaaaaatgaccaaattcttgaattaagtccttttaaaagttattggccattgttgtttgtaaacatatattttactaaaaccctactaaaagaaaaattattttaacaaacactgaacagttttattctaccttctaatgattaatttatgtattattttatcattcaacaaatatttgctgatcatctactgtgtgatgggcactgtgccaggttgtttgcagttatcgcagctcactgatatttgagaagcctatttcatgttgaatagagcagcttgaaagaaaacttgttctgatgaaaatttgggttccattatcttttaatcatgtgtgtttctgggtacatattttgtaagtacatttataagttggcaaaacatacagaattagcacatggtcaacaatgattgcaatgactttaaatcatctaggagtatcattttagacggttgtggcagtagaagtgggatgatgaactggctagactcagactgagtagatagtcaccaccattgtgtatatattttcctctctcaaaacaaaggaataaacaatgcaaagagtgaccagtttcctggaaaatgccttgatgttttttttttttttttttgtgatactttagattccccattttgagcattagtagcttttaaggaaggcaggcttcactaaacaagtgtcaatctgtgcacatctaagcatatttgatagttgaaagatttccaagtcacaatttcagttcaactgtatggatatctataaaatattgctatgccctgggaattatgctgggcattgagaatactaaaataaataaaatatggattttggcatcaagtgtcaagttgtcaggtaccatctatatatgggtgtggtggaagggatacagggcaagggaaattattaagtcaagcaatctgcaggtaggtaactgtaattctacttgttgcataataaactattccaggagatgcaaaatgagtaagtaatcgataaaattatccttcatgagtctagaaaaaaaataattcgacttgaaaatattcatgactgaaaacaggcttttttgataaagtgaattcctttaaagtaattataactgaactatgtaccatttgtcaaatataaagagtaacaatgtactgcaccggggcctaatttcttggtgacatactgatttctggtgacatagtgtctccatgttgaatagacttttaatcaggatcagcacaggcatcatgataatttaagatattctaacattctctttttaattttttaatttttattttttattattttactttaggttctggggcatatgtgcagaacatgcagttttgttacatagctatacacatgccatggtggtttgctgcacacatcaacccatcacctacattaagtatttctactaatgttatccctcccctatacccccacaccctgacaggcctcagtgtgtgatgttcccctccctgtgtccatgtgttctccttgttcaactaccacttatgagtgagaacatgtggtgtttggttttccgttcttgtgacaatttggtgaaaatgatggtttccagtttcatccatgtccctgcaaacaatatgaactcatccttctttatcgcttcatagtattccatggtgtatatgtaccacattttctttatccagtctatcattgatggacattcgggttggttccaagtctttgctactgtgaatagtgctgcaataaacatatgtgtgcatgtgtctttatagtagaataatttataatcctttgggtatatactcagtaatgggattgctaggtccaatggtatttctagttctagatccttgaggaatcaccacactgtcttccacaatggttgaactaatttaccctcccaccaacagtgtaaaagcattcctatttctccacatcctctccagcatctgttgttttctgacttttgaatgattgccattctaactggtgtgtgatggtatctcactgtggttttgatttgcatttctctaatgaccagtgatgataagctttttttcatgtttgttggctgcataaatgtcttcttttgagaagtgtctgtttatatgctttgcccactttttgatggggttgtttgtttttttcttataaatttgtttaagtttttttagattctggatattagccctttgtcagaaggacagattgcaaaaatttcctaccattctgtaggttgcgtgattatagtttcttttgctgtgcagaagttctttagtttaattagatcccctttgtcaattttggcttttgttgccattgtttttgtgttttacacatgaagtctttgctcacgcagtgtgtcctgaatggtattgttcaggttatcttctagggtttttacgattttaggtcttacatttaagcatttaattcatcttgagttgttttttgtataaggtgtagggaaggggtccagtttcagttttctgtatatggctagtcagttttcccaacaccatttattaaatatggaatcgtttccccattgcttgtttgtgtcaggtgtgtcaaagatcagatggttgtggatatgtggtgttatctctgaggcctctgttctgttccattggtctgtatatctgttttggtactactaccatgctgtattggttactgtagccttgtaatatagtttgaagtcaggtagtgtgatgcctccagctttgttcttgttacttaggattgccttggctatgcgggctcttttttggttccatatgaagtttaaagaatttttttttctaattctgtgaagaaagtcagtggtaggttgatggggatagcattgaatctataaaattactttgggcattatggccattttctccatattgattcttcctatccatgagcatggaatgttttttcatttgtttgtgtcctctcttatttccttgagcagtgatttgtagttctccttgaagaggtccttcatataccttatatgttttattcctagttattttattttcttagtagcaattgtgaatgggagttcactcatgatttggtctctgtttgtatgttattgatgtataggaatgcttgtgattttcacacattgattttgcactaaatgcccacaagagaaagcaggaaagatctaaaattgacaccctaacataaaaattcaaagaactagagaagcaatagcaaacaaattcaaaaactagcagaagacaaaaaagaactaagatcagagcagaactgaaggagatagagacacaaaaacccttcaaaaaatcaatgaatccaggatctggttttttgaaatgatcaacaaaacagatagactgctagccagactaataaagaagaaaagagagaagaatcaaatagacacaataaaaaatgatataggaaatatcaccactgatcccacataaataccatctaacatcagagaatactatagaaatggtagttctatagaattctatagtatattctattctatagtattctattcaaatttatatcctatagtgttctatagaatatagaatatactataaaatacttctatacaaacttctattctatagtattctatagaatatagaatattctacctatgcaggtatatagaatattctatagaatactatagaaatacaaactaccatcagagaatactataaacacctctatgcaaataaactagaaaacctaggagaaatcgataaattcctggacacatacaccctcccaagtctaaaccaggaagaagtcgaatccctgaatagaccaataacaatttgtgaaattgaggcagtaatggatagcctacaaactgaaaaagtccagaaccagacggattcacagccgaattctacaaggggtacaaaaaggagctggtaccattccttctgaaagtattccaaacaatagaaaaagagggaatcctccctaactccttttatgaggccagcatcatcctgataccaaaacctggcagagacacagcaaaaaaggaaaatttcaggccaatatccctgatgaacatcgatgcgaaaatcctcaataaaatactggcaaactgtatccagcagcacatcaaaaagcttatccaccatgatcaagtcggcttcatacttgggatgcaaggctggttcaacatacacaaatcactaaatgtaatccaactcataaacagaacccaagacaaaaaccacatgattatctcaatagatgcaaaaaaggtctttgacaaaattcaacagctcttcatgctaaaaaatttcaataaactatgtattgatagaacatatctcaaaataataagagctatttatgacaaacccacagccaatgtcatactgaatgggcagaagctggaagcattccctttgaaaaccggtgcaagacaaggttggcctctctcaccactcctattcaacatagtactggaagttctggcccggacaatgaggcaagagaaagacataaagggtattcagttaggaaaagagggagtcaaattgtctctgtttgcagatgacatgattgtatatttagaaaacctcatcatctcagcctgaaatctccttaagctgataagcaactttagcaaagttcaggatacaaaatattctaatattcttaaagtaaatttcaaaatagcattattactataattccttagtatgtaaaagaaaatcttaacaatatcaaaaaactacttgtgtataacaggcaaattcaattctatttgtaagcacataattttgacccataccaacaaaatatatttttgataagatgtattatttaaagtttactgtttaacttttaccgtttttcctgttctgtgtttttcttaataatttgcatcagacttttatagagtgatgccctcccccatagtgaatctgtattttggaaatggagcttttttttttttcctttttttagtttgaggcaggtgtaaacttagctctagagcaccaacctaaaggttattatacttaaaaacttagaggccactgtattttactgttccagtttcaacattccaggagagagaaatagattggttcagcttataataggtgcctctactgtgctttgagttataggcaggagtgtgtgtaccctgagccaggaaataactataatttataatctacaatgtacagtctccagtgtaaattgtctgtaatcaatgatgatcctaataaatggtcttgatgtatagactctatgcagggtattttcttttaatagaatagatactttatgaaaataattttaacatcaagtacaaaatgaatgagaaacctctatttttcaaatatcgtttttcaaatatcattacatggccatccatacaaaatactacagcttttaatatcaaaaggcttttttacaagtaaacttggaaatattgactgaagtacacaaaaatataaacgaaaaaggacaaaaacacacacagcgactcgctaaggcaatactaattacaaaatattaaattatgaatttattgtggttatatgttaaataatattagctacttttcaatgtattcacttgattttcttcagttatttttctgtatttataaatactaaatgttttttcaccctctcttcaggagatatttcttcactattcatacaaaataatacaatttagaaatacctacttctaaataaatatttgtaatgtgccattttaaattgtgtgagcatgaaaattacaaattaggttaggtattctacatttcctgatttattatttccctgcaggctcttgtgagccacccttggaaacagcagtaagcaagcattttgcagctctggtgaaatgtaggaggtagcgttattttagtaccaaagtgtgggtatttttaagaatcaagtctcctggttttacaccttttaatgttgagactagcaagtggactgaagtacaaatggaaagtagggaggtgaaatactgagtgattgctttgagttttccatatcactcactttcacattttagaaagaagggtagtagtttagaaagaatagcagcagtgcaaatctatacataatatattgcatttggactttcaaagtcccatcaaatacacatagtccacccttcttttaatggtgaaaactgcactcagtgagattgaatgggctatctctaaatagtgaattttgataaaaatattgtctgggtattgataaaaatgttctcctgtggggatgatgatcagttatttgtcacttatttatttctttgcaacttaaaatctaacctcatgaccttctgcaaacattagttagttgttcaaaatttataaacttggtagtcaggatagctgcacttgaatcacagttccatcgtggatttgtgtgtgatcttgaaccgaccttgactgattgcataaaccaatctcagttccagcttgtaaaccttcttgaagtggagcttgcagtgagccgagactgcaccactgcactccagcgtcggcgacagagcgagacttcctctcaaaaacaaataaacaaacaaaaaaaccttcttgaggacaatgagttttgaaaggccaccttatctcatgtctcggtgtgtaggctgaaactcttatcagaatgtgttttgagatttttgaaacattggaaaataaatgttacattaaacaaaattcaaagcaaaacaaatcataagcctatcatttaaggtcttaagcagtttctatctaggaagttgagatcttatatactccttttagaacaaaaatggctgtgttgtgggcaaatacctgaactgggccttttagtcaatcagacataaagcaaagaccctgtgttcttagtgctgtaactacattgagggtaacaacgaaacggagatttctaatttggagattcaatggctactctaaaggatttgggggaaagacctaagtgagggggaaataatttaagagacaaggaagagttcactccttcctttcctgactctgttacttttcatgttgagtgtgggctcttttggtgagaaatgtatgaaagaggctctcccacctgcagggctgcctctgagtctgtgcgacaaacagcagcataaagtgagagggggaagccagcgctggtgcttgacactggcagctacttatactggcagctacttttactttgttaccttctgtgtgttgactgggtatctagcaaaccaaaatgtgcatttctattttgtttattacctcctcactaaatactctctcagtagttcaaatagtgttttgtaacttctttatcaactcattaaatgattctgtattatctataaataattttgcttctgccattgaatagccctagctattatcttttatcttagcacattcatcacaatataaattctttaaaagttagaacactgaaaaaaggaaatcagtatctgaacagctatagaaagagaggctttgaggaaagagaggtgaaagaaagataaaaatgattttagcagctaaggtgtgacatcatgatggcctggaacagagcatgagctaagaaaacagagaaagaatgtatattaatcaaggttctccagaggaacagaactaataggatagacgtatatgtgaaagggagtttatgaaggagaattgactcacatgatcaccagatgaagtcccatgatggtcatctgcaaggtgaggagcaaggaagccagtagtggctcagtctgagtcccaaagcctcaaaagtagggaagctgacagtgcagccttcagtctgtgaccaaaggccccagaacccctggcaaaccactggtgtaagtccaagggtctgaaagtcaaagaacctagagtccgatgttcaagggcaggaagcattccgcatgggaagaagatgaaagccagaagactcagcaagccagcttcttccaccttttcctgcctgctttgttctattggtgctggcagcggattggatggtgcccacccacattgagagtgggtcttcctctcccagtccactgactcaaaggttaatctcctctggcaacaccctcacagccacacccagaaaacaacaataatttgcatccttcaatccaatcaggttgacacttaatattaaccatcacagaatatatatgaaaagttttaaggcaagaaatttactgggctttgtgatatagttaagcaacaaaaaactaattcccgattttcaaactaggagcaatttttagtctaattttgagtagtcatgcaattgattacattattaaaagatcttaaagctccctaccatccatttatggtagagaaggtgtcatcaaggaaattaattataattctgagtttctgtggaatcctaagtttacaaattcaaaagaaattaatagtcatattaattcactatatcattacagtttgatgttatatgcatgacagtaattaagattcatttattcattcagtaacaattattaaactgctttttgcagtttttctaggcgcttgagatttatcagaggacaaaacaggcaaaactctgccttcatgcaacttactctcagatgggaagaaactgatcataaacaaaataaatgagtgaacatatggtttgtctgagagtgcaaaattctgtgaagaaacaaaacttggggaagagagataagaaaagctattttaaataaatgtgagagaaagcttcatgaaggtgacattgcagcagacactcatataaggacagagaggtagaagtgtcatgtctcatcctttagaaggatagtgagccaagcagagaagcagccagaagtaaagacactctgagcatgttgaaagaagagctcagccagcgtgagcagaccaaagtggataagaagaatagaggagaggaaggcagaggtagtgggatgaggagagtgatcaaaggggccttgtcagccatagaataattctgaatttttctcagattgagatgagaaacgagcagagagtgttgatcatgggagttagatgatcctataaacattttcacagtaacactcaggctgttatcagaaaagtagactatggggaagggagagaggatcagaagcagggagaccaattagagagctattgcattaatccaagcaaaagatgaagttggtttggatcagagttagcaatgaggatgatgagaatagatggaatgttctgtgtatttgaaagtagagcaaataggaccagctgatggcaagaatgtgaggttgaagagtgaaagaggagtcatggatgatttcatggcttttgacttgaacacttgaaataacaaacttgagatggagaagcttgcaggaggtgaaggtggtgattgttttgtgggaaggtttggatttgtccttttgagcttattaaacatacaagaggagattacatgatagccaattgggtatatgagtctggagtccacagacaagcaagttaaagatcttaaatacagagtagatatgtattatcaggcttgatggcttaagaagatctagggaaaaggagtccaaggactgagttctaggatccatcagtaaccacaggttaaggaggtgagggggagacagcacttgaatcatgaatttaaatactctttttatttttaaaaatgtttacaaaaagagctttccaaatattgtgacatttgacttgcagaattctacttctgaaaagcagcgataaaactacgttggctattgtttgtcctgcagttacaagttgcaagagttttgactttcattatcatcctttgatgagtacctatccttattatacaaatccagaaaaaaataattctattgtggttctctgcatacaatatgattcctcacgcttgcctttggagatgaagttttctccttcaagcatgctttaccttgtcttgttcagcctcagaatcccagatagcaagacaagaaagctttgctctcttttccaggaagatagttagcaagaacagggagggcaggatcagacatcaataatcttactaggggaatggcatttacctctaggccaccagagggcagggcatcaatccttcatctgtcctgggtatctgcagaagcctctaagaacacctgcaagttattttaagtctatatcacccacttcctactcttattcatatcactgaagaaaacaaagtggaaacaaccagaaccaaagcaaaatgctccctaaatcctagtcctcctttagcttaatctactttttttcctgggactagaaagaaagggggctgtttgtttttgttgcatacacaagaagttagggtatacactctgtatacatcagactgtatcaggaactgttttatcttctatgcaacaagcatttttctgaacaaggtctaggtgtggagctgcaatggtgatcatgacaaactaaccttattcatggaactttgtcagtacttctcaaatcatttttgagggccatttttctctatatatcaagcacaaataatgcttttgtaatgtacaataaaatgaattactataaaacaaaataataaggcattcaaaatgcaagtttcagcttattattaggttctgcaaatataacataaaaaataaaaatgtatgtatttgttgagtgtggatatattgggaataatatagataattattatgcttataattttttgttattctggaattagaactaaacacaaagttatgagagaaacagtaatttttcatattaaatgtctatatgcatatttagaatgaacatcatatacatcaaatatttacattttaatgtggcacatgcttggttgtggcttattaatttatataatccctttggattggttacagcatttcttgctgggaataatgtataatctgaactgtttccattctttgtattaacatcagttatagcagagaaatgaatcttagagaaatacattggcagtaatggaagaagagattttgaagcaatttcagcaagtttaggatatttattttacaattttttccagggccaggtgcggtggctcatgcctgtaaacccagcactttgggaggccgaggcaggcagatcacttgaggtcaggagttcaagaccagcctggccaacatgatgaaaccccgtctttactaaaaatacaaaaattatccaggcatggtgatgtatgcttgtaatcccagctacttgggaggctaaggcagaagaattgcttgcacctggggggcgaaggttgcaatgatctgagatcacgctactgcactccagcctaggcgacagagcgaaactccatctcaaataaataaataaaataaaataaaataaaattgtatccaaaaaaggcaaattttaccacattttcaaaaattcatcatcagtcctgcattagtagcctgctccagtatttatcctataaagttatagttaaatacatttttatgaaagaaatcaactcaggatccatgaattttcatatgtggatcttatgtgacaaaatataaattcaaaatgttctatcagtgttctaaaatggtctatgataacttttcctaaatgtgcgatatcaagatcatcactttttcactgattattgtacttaatttatgaaccatgtcataaataattgtagaaactctattattctaagcttctaacttttgcttggtcctttgatcctacctgccattgcaaagcatgttgcattcattccttgcaatcagtagaaagatctttaaagataccaaatatataagataagtgaaggctggctgtccaacctacatatttaaaactttggaatgggctagtttcttatcttgtataaataaaagttttttgttgttcagatattctcaagaatttttccatgtgtaaacttggtgcctcaacatgcagtataggtgctataatcaacatctatgttattacataataaatataacaattttgtatttaatgaattagcttttacatacataaatcacaaattttacgaaatagctaagaaccctgatatttagctgatacttctattgtgcactaaggttttcttgacgaaggaagcagtaccttggtttatggtctatatgaactccttaatcagactacatcaaaatatttccctgccatggtagcttgccaatctacttctagaaaacaaacaaacaaaaacaaaccacaaaccacattactgatttctaagcatttttctcaatgtgtgtatttatctctttgctggtgagtaataaactgttgtggactggcagtttgaggagcactgttatgtggaaagtagagataatgtctactttgcagagttgttgttaagattatccataatcttcacaaagtgtctatcaaatattatcacagacatttaatttacgagagctattaatttgcattgtacaattatttttcattttaagcaaatctatagtacaaagagaataagtaacagactgtatctgaactgaaaaagtggatgaccttgtagagaaatttatctgtctgtttatagctatgcgtcaacattttgatatataaagatacaggtatgtaagtataatagagtatctcctgcaagaaaaactaacaaattgttaaagagtggtcaatatataggcagaaaaattacagcccatccgcgagattagagaaaaaacaaaacaaaactcaaaacaggagatgaatttagagattgcttcaaaaggtgacagaacaagttactacagtatgagacagtgctaaaagctttctatgcatttcgctgttgtaattttattctgggacgtttttcacccaatcaaaacgtactggagaaatagtggatagtttattttacttgaggatgcttaaaaagcactaactcatattgtactcacaatggagatactgctatgcacattttacatacaagaatattgaagcagagggaaacttagtaatttgcttaagttgcaatgtccttggtggtgcaaggatactaagcagtctgatgtcactcatagcctttgcttatccatggtttagagtgctgtgtcatggatagtaaatgggagcttaaaatggaaaacttagtgtaaacttgtgtgggaaataaaatggatagagattttttttttaagaaaaaacaaaaaaactcaaggtgagtgcacagtgcacaaagtgctgtgaaaggtgatggaggtaaagaggtatgactcttttgtcactgggaggtctagctggcactgttgtctctgaggaattaaagctacttgtgagacagagaaccaagtgtgcaatcagggtggagtctcttcattcgtgggttgagtctaaagagcacatggaaagggaaaatcacttgtaatgtttaaattgttcaaaagtccctaaaattgcccccaagcatgagaagtacatcccatatgtcatttcactttctgggtgtttatttgcttgctgagtggagtggcagtctatcctgtatggagcaaggtcaggtacttcatatgagaagcagtaaggatgcaaactaagaagtggagaagaaggaaataaaaggcagctgtgaaaaaactaaaatttttaaatttatattggcaataaactggtttattgtataatcagggaagacttgagtaggggttaatgataaccaatgatgacttagttctcaaagctctgtgaatgtgatgcccaaaatggaatgaaggacttcgggtggaggagataaatgtgaggagaagggttaaaatgataaaaacagagaataatgaattttggaaaggaaaagtaatttatattgaaaaataataatatgcatacacaaatgcatgtattatataaattgaggtacagttgatctaagcatctgagaacagcataaaactgataagcatttaaagtacaattaccgtgagagtgtgtagtcagatcacagtagaaaacacatggcaccatcaaaaggttcaagtttagagggcttaatgaagatactatattacaaagatgtgggaaggcttaaaggaactaacaaaagatgaatagctcatggaccagaaaaggtgaggaggtattacttactatccctaaggctgatatggcatgtggcttcagctgtaatcaaaacgtgcagccactaccagagcccaaataagtattccaccttacttttctaccctacaatatgctgccattgcctttctttggctgaacctaattgtaagccagaggacaggggtgctgggaaaatgcattccataaggatcagttgctcaagacatagtgtagcccatatagagtgcaggggatgaaaatggcagaatctgacatagccactatgagtaacaaaattattctctgaataatattaaagggctatctgtaggatttggaatacatattttattttatattttctaaattaactttgttttttagtcactgtgtaccgattttttaaaaatgttatgacagccactttttaaaaatttcggtagcttttgggttacaaatgttttttgtttacatggatgaattatatattggtgaattctgagattttagtacctgtcatctgagctgtgtgtataaatgttttcaaatactaggtcagggatgaattcttactgttaatgctttaatcctttttagatgttttctttgttctccataaatgtagattgtattgaaaataattttgagtataaactatttcatttaataattgttatgttttacaatttcagtaatatctctgaaagtaaaataatctagcaaggagattagttttgtaattgtatcatgacagtataattgttgaccttttatatcatcacatgcttttatagaaattcagcataatttttaaaacaactttatcattctgatatgactcatttattatatatttttcaagtacattatcaatcactttacttggagcattctgcgataccaatgagttaatcatggcatatgtgcaattactggcatctgttactctttaatttttgtgtaaagctgcccactgtattatttaatgaacaaatgcacttatccttaatcattactttgcactcaacttccattaaaacaatgacaaatcagacattcacatttcaatcattaaaataacagtaatgaattattttcctggtagtagggtttttatagttgtttttcttaaaatgaatttttatcactttttttatggttagcatagatgcaaatgacagagattgttttaataggcagaagttaagagaaagtgtgaaatacttcctctttctctcacttgcaagatgaaaagattccccctaccgttagcaaatgatagtggggaaatgaaggataagggttggagaagaataaacatttttctttgaatttaaccatggggaatttctggaagatttacaaccatattggttcattgattactcagatggcagacagatattctcagtgtgtgctcccttttcctaatgaaaaagactattagcccacctcaaaatgtatattaaaagttttatttttgttaaacggagagctctgtttaacctatttgcagaatcgggcctctacttgaaaacagcaatcacttttgaagaaatatcactgcaattacaaatcaagtggaagttagaatagatataatgctgttacattctgattacaagataaatgtagttaggaactgttgagttctttgtgatccagaaattatgtagaaaattctaattttactaagttacccaaattgaccccaaaatggatggtcacatatgcaggctagaaactgaatcaaggatgctgaaaagcaccattaatactgcctttttcaatgaccttaaagagagggtattaagaaaatcacactaggtttcattaagatgaataaaattgaacatttaagtaaaggaataatcatttttgaaaaacataatatgaaaatatatgaccataaaatcttgatagctctctagcagtgcttgtagaaattgcagtctcttttcaaatgttatagtaggtggcaactcagtagaaaattataatagctgtcaaaattcgtatacattttataaaatatgcattttgttactttttcaggtgcttgtagtaatgtatatacactgtgttgcatagcgcggtgtgtagatccatagagacagtatgttttctttagtatcaaataacttgacaaggaaattataaaattctttagaaattcaagtgattctcagtaaattaagcaatgggggattattctatttatggaaagcttaatcattttctatctcttttattattttagaaattccatttcttttattgtgtaggaatcagaccagaggctactagagagacaactgattagaaaagttcatgagaaaggtttcaaaaggaaaatcttcctgaggcttattttcatataagtctttagaaagaacagttaatgctgctgtgctgtatttttcccaaatgtattgtttttaactcataaaaatttttctctcatatatcgtactcaaagtgaatgattcaggtcaacaagatatttctgttccacgatgtcattcatggatccaggttctttctatcttgttgccctcccattgcccgggctctgttttcatttgcttgtctgaagttggttatggacaattccatgttttagtttatgaaaagaataagaggcagaatagagaagtacacattggttacctcaatgcccagttccagaagtggtgcatattacttctaggccacagtagctgcaagtgaagttgggaaacacagcttaggtgggcaggtaccacttaccatttattacaatgcaagaagaggaaaattgaggttagtaaacaattattagaccctgacgtgctatccaagcttcttgtaggtttggcagagattttaaagggcaatttagaaactgtttgaactttcatatttgccataatcccaaacacgggtaaagcagttgtaatatataatatcagtcgcttctttgtacttatatatggctcataggaaaggtaagcatctgtgttctaaacaaaaatagatttttaaaataggaattttaaaacaggaataatctttgaactgtagattaagaaagaacaccatatgggagaaaagagaaaaaagacttctaggcagttcatagattatacagttataattttcaatgacacatatattacgtatgaccaggtaaggcctcccaaatctaccacagttagcacatcagagttcaaaagtctactcagctagaaactttatacctatgtctatatatcgttaaatgtggctatgcctctcctgttttcatttacttatatcttgtataattcctcactctctcattctttgtttctccctgacttctatcatcattgatgttgttctttcagctatctaacttttttctcttaatattccattttaatcccctaattttcatcctacaaaccatattgttttctccttcagtgcattgcaagttctgtgagggagataataatgaccatgtaaccagcttttgcaatactgtacctgacaaatgatagattcccagtaaatcctactaaatgagaaatgagagaaaaatagaaaatctgaaatatgaagttcctttcctacattatctcttgaagtgtaaatctcactttgtaagttcttattttatctgggctaagttgggcccagaaattattttatttgaccataagtatactttagtgtctagcatcaccctatataaaaataataaaactatatctctacttcttgtaacactgatttataaatggtaagtaattcaagattatgtgtgtgaataatttaaagacatacttttagaagcagaacaaagcagaaagatgagtaattatatcctaatttcaggtttctttaatagtagccattcaagataatgtctgtgaaggactggctttctctgccaaacataaggatccaccaactgatctgctttttttttgcttttattatttttaattgacacataataattttacctatttatgtactagagtgagatattttgatacctatatatgatgtgtaatgatcaaatgagggtaattagcatacctatcacctcaaacatttatcatttctttgtgttgttttccaaatgtagttaactatggaaaaaaatcactatacatttattctgggcactttaaaataaagattgtatatatttaagttgtacaacatgatttgatataagtatgcattgtgtaatgattaccacaatcaaattaattaacacatccatttccacccatgctgtaccttggatccccagaccttgttcatcttctagctgaaagtttctattctttgactgacatttccccatttctttgcccctttcccagtcccgggtaaccactattctctctgctcctctgagttcaaacgtgaaatttcacatataagtgagattacatggcatttgcctttctgcgcttgacttacttcacttagcgtaatgttctccaggttcactcatgttgtcccaaatggcaaaatttcccttttttaaaaggctgaacagtatgtgtatatataccacattttcttttctttatccatttatccattggtggactcttaggttaattttacctcttgactattgtgaataattctgcaatgaacatggaagtgcagatatctcttccacatactacttcagtgtcctttggatatacccaaaagtaagattgctgacccatagggtagttttatacttttctttttatttttgaggaatcttcacaccattttccataatggctttacctgtttacattcccaccaacaatgtacaagtaattaattttcttcacacgctcgccaacacttgttatcacttctcattttggtaatagtcttcctaacatgtataatgtgatatctcattgtagatttgatttgcatatccctggtgattagtgatgttgagaacgttttcatataccttttggccatttgtaggtctgctttggaaaaatttctattcaggtcctttgcccactgtttaagaagattatttgttttctttttgccattgagttgtgtgagttcctgatacaatatggatattgaccctttatcacataaatggtcttcaaatagtttctaccatcccataagttgcctttcattttattgattctttcctttactgtgcaaaagctttttagtttgatttagctccacttgtttgtttttgcttttgttgctcaggctttggtatcgtattcaaaatattcattatgaataccaaggatattttcccctagattttcttctaggagctttatggttttagagcttacattaaagttgttaatccatttcaagttacttttgtatatggtataagggtccaattcttttgcatgctaatatccagttttctcatcaccatttattttcatttttattttgtttttggtcagaagatgtctttgtgcattttatttatttatttatttatttatttatttatttatttatttataaacttctattacaggcccagggggtacatgtgcaggcttgttacatggatgaattgcatgctgctcaggcttggtttacaaatgatcccatctcccaagttgtgagcatagacctgataagtagcttttcaaccctcgctccctgcaaccctcccacttctagtggtccccgttgtctcgtgttcccatcgttatgttcatgcgtactcagtgtttaactctcacttataagagagaacctgtggtatttggttttctgttcctgtgttaattcgcttaggataatggtctccagctgcatccatgctgctgcaaaggacacaggttgattctctttatggttgtttatcattccgtgaggtacatgtaccacattttctttatccagtccatgggcatctaggttgatttcatgtctttagtattgtgactagtgctgcaatgaacatattaatacatatgacttttggtagaatgatttattttccttcagatacatacccagtaatgggattgctggatagaatggcagttctgttttaacttctttaaaaaatctccaaactgctttccccagcaactgaactaatctacattcccacaaacagtttgtaacggttcccttttctctgcaaccttgccagaatctgttattttttgactttttaatactaaccattctgaatggtgtgaaatgatatctcattgtggctttgatgtgcatttatcaaataattagtgatgtaaagcattttaaaatatatttttggccccatgtatgtcttcttttcagaagtgtctgtctatattctttgctcccttttttaatgggtttatttgctttttgcttgcagaatcgtttaagttccttatagattttggatattagacttttgtcaaatgcatagtttgtgactattttctcccattctgtaggttgcctgtttactctcttgatactctctttcattgtgcagaagctctttaattaggttccacttgtcaagttttgttttgttgcaattggttttgggaagttataaattctttgccaaggctgatctccagaatggtgattcttaggttttcttctagaatttttatagttttaggctttacattcaaatcttcagtccatcttcagttgtttttggtatatagtgaaaggtgaaaggtaggggttcagtttcactcttctgcatgtggctagctagttatcacagcatcatttactgattagggattcctttccctattgctcatcattgttgactttgtcaaacatcagatgattgaaggtatttggctttatttctggtttctctattcttttccattgctgtgtgtgtctgtttttgctgttttggtttctgtagccttgtagtgtagtttgcagtcaggtgatgtgacaaatccagctttattttttttgcttagaatttctttggctattcagcctcctttttgctaccatatgaagttcagggtagtatatccagttctgtgaaaaatgatgtgtgtagtttgataggaatagcattgaatctgttggttgatttaggcagtatggcaattttaacaatattgattcttccaattcatgagcatgggatgcttttcatttctttgtatcatctatgatttcttcatcagtttttgtagttctctttgtagagatctttcatctccttggttagatctattccaaggtattttttctaggtatcatgcatgggatcatgttcttgatttggctctcagcttgaacattattgttgtatagaaatgctactgatttttatacattgattttgtaacctgaaattttcctgcagtcatttaccatttctaggagccctttgatggagtctagagttttctgggtatagaatcgtatcatctgcaaacagagataatttgacttcttatttttctatttggataccttttatttctttctcttacctgagtgctccggctaggaatttcagtaaagtgttgaataggagtggtgagagtgggcatcctcatcttgttacatctcttcagatgaatgcttccagcttccgctcattcagtacaatgttggctgtgaatttgtcgtagatggctgttagtattttgaggtatttttcttcagtgtctggtttgttgagggtttttatcatgaaaggatgttgaattttatcaaaagcattttctgcatctatttatcaaaagcatttctgcatcacataattttgttttaaattcagtttatgtggtgaatcacatttattgatttatgtatactaaaccatcactgcatcccaggaataaagcttacttaatcgtggcgaattagctttctgatgtgctgctggatttggtttgctagtattttggtgaggattttttaatctatgttcatcagggatattagcctgcagttttctttgttgttgttgttgttgttgttgttgtgtctttgttagattttggcatcagggtgatgctggcttcatagaatgagttagagaggagtccctcctgctctattttttcaattagtttcagtaggattggtaacagttcttcatacatctggtagaatttagctgtgaatccatctgatccagggctctttttggttggtaggtttttcattactgatgcaatttcagaacctgatattggtttgttcaggatttttttatttcttcctgactcagtcttgtgaggttgtgtgtttccagaaatttatttatttcctctaaagttttcagtctgtcccagcaccatttattggagacatcttttccccattgtgtattcttggtgcccttgtcaacgactagttgatgatgtctgcatagattccaggggtctacatgtctgttttatgccagcaacatactattttaattaatatagctttgttacagacaaagctatatcatcatcatcagaaaacatgatggttccagctttgttcttctttctcaaaattttttggctctttggagtcttttgttgtttcatatgatatttaggtttttttccatctgttaaaaatgccattggaattttaatggagattgcattgaatctgtagatggctttgagtagtatgaacattttaacagtactaattcttccaatccatgtacatgggatgtattttcatttatttgttgtcattagtttctagtgggaaattttataggatttaagtgccaaccatctatcaaatctctaatctattaagacaaccaaaattcaaaaataaagttcttcttatgattgtcaaaggtctcttaacatgaagacagaaatcatggatctactattaactcactttttaaaaatttggatgcttaaaaagagaaaaaaattattatactcttatggtaagatttaaatattcatagtgttatgttacctgcccttaagaattataaatctcgaaaatgcaagccaaacacaaataatattctatatataaatcaaagactgtcatgaagcttttaattggttagcgtttttaactacatggccttaagaaaacaggctatagtgcaaccagaaagaatacaagtaaaaaagtgtcaactaataagatagacatgagggtataagtagaaaaatccactttctacttcctaatcacatttcctatgtatggacttgtgttgttacaatatatcaaaatattctgatctgctttatgttggacaattattttttgagaaataatgatataaacacttgttagtcccataatttatgttctgagtttgacttgtagttatatgctttgtgcaaaggaatctgttgaatctactggacacatggagaacaacatttccaattgtagtctcatttgctgggttaagttttcctgtatcttcttggggaaaaaaaaaaaaacacgttggccttgggtgcatagtaatagaataagcattcatcaggagattgttatatatcacaaatggggttgagttgtcacaggtgacatctttaatttcctcaatttgagtgtaaaggcctagagaagttaattgttcagaactcataaatgacacagctgaaatctaactagattagccaagaaattaaaattattgagttaaatattcattcaatgtgtggctatatgtgagtgtgcttgcacacgcatgtgtgtgtgaatgttgaaatcagaagtatgacggtctcttgatccactgaaatgataagataaaagagtaaagaaatgtgtaacttcttgatggacatccaacttgcagtgaacaatgcaaaattttaaaaatttaaataaggctttaatctgccacagctctggtatttttgctagggttgcctttcctttttcctcacatacttgtgattaatgttttgatagacatattttgatagcttttaaaaagctacactttataatttgaaatgtgtgagaggtagctactgtgaaaacagttttagcttctttttttttttttttcctgacttgttggccttatcctgttaatcactgtttattctgagctgtaaggaaataatcaaagaatgcctagaagtcaagctcacatgggcatttttcattttggaaacttcaagaagctttgctatgtactgagtctataggcaaaacagaactacagctcttagtttgaattctcaacaaattttgcttccctgatatatcaaatatactttagagaactgtaatgccttttgcttgtttttatttttggtgtttttcctaaagagccccatgtactttatctttcattgtttttcttagaaaagaaacatgcactttaattcccaaagggcatctttgagaccttgtttatgatacagcaagtattttatatatgtatgtgtatgtgtatatatatatatatcttgctatatgtatataatatataatataatatatatatatcccttgcttgcaaaaaacagactcagtatagactgattttattatattatattccatctagtgtcagagtatctctaactaatgaaatttctcattaattaggtcttttcatgttactccctttatttctactgaaagtcaccatatttctagttaattcctggctataaagcatcatatgtgtttaaaagccctcaatgaagaaaatatttccctatgactttcatacaggctgctattttaaatgtcataattgcccacaacttgtcagttttgaaaaagcgttttagttttgagctgccaaatggaataaaaatgatgttattgacttgtaacaaagggactaaagcactctgatagcatctgaccttttatcatcacttatttaaagagctttcaggggaggaaaaaaaacctaccttaaaatgtgcagtaacttgctagtgaagtgctttttcttagtgtagtgagctgagaagagttctggaaaaaagcccagagggcatggttgtaaaaatgaccatttgctactggtgcagataataatttattccagtgaaagaaaagaaaaaactgtggtcacatatggcttcaggttttgattctttctatcttctactgactgctaacaataattaaaattttttagaaacaacctgatcaaggcctagaaaaccagtctccatcttcaatcaatagtggaggtcaggattaatttgttgttttaaaatgtggaaattactctctgtgtttgagagcagtatgtggcacctcttaactatatgacaaaaagggccttgaatttcactggatgtgtgtggcataaaggatatctatttggagagatttaatgggactgaaatagagggtaatggatactgaattggggtaatttatgttgtgcactgaagaagatatccagggaaacttcaaagacaatccctcctgcatgactaaaactgaaaaacatttcaaagctctctgcctcttacatgaaactaagtatcaatctattggtttcagaatttatatatttaaagattttgatacgagcaaaatggcatctatacagccatgtgagtgcctggcaagctaaagcacaagaacaaacatagttcagataacaggcaaagttatttcaggtggcttctaattcaccatgtgagaaagaatatgaacttgccaattatgaattacataggagggatcattttcttctgtagttgtaaaaatgaagatctcagtttccatacgatatagttcaatgaattttttttcaaatggcagcagttttaataagggacattccatgatctgagatatgattaggaatgtgtacaagtcatgttcattttagaatatttctcatcgtcctaacaacacaaattaaaatcagtatggctaactacttcatgtgttataatgtttgatgagttaaatctggggatctctgcttcacttcttgaaatgtataaatgccactaaaataaagggaaaataagcatggtaactgttaactggataatgtaatgttttcatgcttctcaagtagaactttctaaagtattttcaatagttttaagtgactataatattaaatataaaaaacattctccttttacctataatttaattagggggaaaaaaacagttccagagagatttcgcaatattaaggaagaaaaattcatcatggtgggtttaacctgttagaattgaggtagagctaaggaatcagaggaaagacactttgtacaaagtggagatttttttttccaattgtgtcagttatgtctcgtcatcattctttggaactgactgacatgcttcagcaatcatttttgacgttcaatacacatgagaattttgggctagaacaagaatcttttcttgaaaatatctacatgaactctgacaaacaatatactgcttaaaagagctgtactctgttactattctgcaggtatattaatttagagtatatttttaccataacacataacttctaaaattaaactccactgtaagataaaaattataatcaaagtgtgttgcttcctattctaagtagtattaggaaattatttacctgagatattgtgataaaagtatgctgcatttatactaattatccattcagtagcttcctccatagcccttataatgcatattctactgttataagcacaccaatatgaattcactggggcattatcactaccatacataaatcagacgaaatatttggtcattttgattatcttcaatgtttgtttgtttttgacaacaatattttagaatcacttcatctatacatactcaactcaaattttaagtggttatcttattaatagtggttaaagaaccatcactggggctaaagtccagtgtgtgggatcacattaaatcacttgcaatctatgtgaatttaaacaaggggcttgaatcttctgcatctttaaaaggaaacataaatcaaactcacctcataggtcaagaccacctacataaactgtgggctcaagaaaaaataaaaatgtagggcccttactcaaacatcatgaccaatttcaagttggcagtagcagagcattaatcactgatggcagagcttgaagccgagattggagctcttctaaacacagagccttgtgcaacccaccttggaagctgttgtgaagagtaagtttataaactgcttattagcacatattatgcactcaaaaataattttaacaattattttctacaaaatttttatttgaggtgctctggttataatatacttttttggaggagaggggaggaccttaacttaatctctgcattttggttttgttttgaaattttaaatagtatttttaaaaaccccttagtgagtttgatatgcagccaaggttgaaaaaatcatcagatatttaactaaattacttctcactgactctgtactgtatcttttatatttatacaatatataaaataccagtcatagattgattttatttacccagttacaataatagaatggggagggaattatgaaagtaactaaaatgacttggatgattcaaaggttaataaaggtttattgtccttaaggaaataataacctacagctcaaaatgtaattgaaagcctcttactgcaaattcacttaggggtgcttgttaaaatttcagatgttttggacttagcctgacctactgaatcagaatcttgaggtgggatggagagggaagaacatgtgttttgtcaagcccctctctttaacatatgcttggaaatttgagagccttggtttaatattacaatgcctacttgtcacagctattcttccctgaagcaaatttaacagccaagactgtagtaccctaattaacattgctgttcacctggtgtctataactcactgtgtagcatagggcctgagaggaataaaaaagctgctccgatttttttcccttgctttactggcaaggtcaaccctcattttagttattgaaatagtataatttcttctctagtctgttaaagatgactattctgaaatatatgaaaattcctatttttatatccccttgtccattttgtaatatttataatactctctctgtctatatattttcctctgtacttagatcttacataaaaggctaatcacacataataataaacatgaaaaacatatggttattattctttgccattttttttggttttaaccttaggactatttctttgtactagctactctgctgcctacgatagagagctcaatgagtgcacattgcaattggtgtacttcttacctcaggcacacaatttagccttctatataattggcattcaggaagatgaggggaagtgggactgaaaaaggaaaggcagtcatatctcataattgcaaatatgaaagtcagggtcacccatttcatggtgagaaagaaaacatcaaaatcctatgtctttatattacttattcaggcaaatactgaatttagttaccacatgttagactaaataaatggctatgtattctttacagatcttataaaatagttcattcagtaaaaaagaaccattttatcattgccatctgagagttccgaataattacgggtaataaaagaggaacaataagtgaaagcatcattttttggccatgtcttatttctcacagggacatgttcattaacgagaataaagattctactcagaattgtatactttaagtttctctttatttgatatataatttaccagttcactctccttcagcttttttctgtaattacttgaattttattcaacatgcgtccttttttgacagccatgttttttagttcaataaatgttatcaagcattctttgactgctcctattgcatcaactgtaattagcttttgattactgttaatttcacagcattttccctttaataagtacatcaaaatgctttcatttctgttgcagcaagtttaattagtttttgaaccatgtttctgtttttccttccatttttagaaaaaaatgacaacacctactttctttgtttctatgaggatatccatgacttacaatgtggtgttcaccaaaagcggtcacctaagacttacaatactaaattgtggtaacatgtagcctttttatttgcatcaagaatattctcatgtactcacatacttataattctgattatttaaaaaatattgtataattttactttcagcttttaaaggtgctaaatgatttatttaaaacaactaggattctaattgatccctcaattcaattaaataagctgattcacactccatgtattcaattatatgacacagaatacctgtattctcttttcagaaatccattgttcattttgtgttagtgaacccaactgttacttgcagtatcccttaggataaaatgctacaaggtatttttcagtggcctatatcataattaatgcaattttaacatgcaagatatatttatggctttttaattatatggatagaactttgaaaataattatataaatttatatgaaatgaaacattaactcttatttattcatgtgacttgaattgtaaactgggcatatgtagggacttaaaacttctaaataccaccaaaaagaaaacccaaaaaataagctgaaagtaactacatatcatatttattactactgaactcaaataccagtgattctaaattggtctatagtattcaatattataactcactttataagactgtaataattgaaataataatataataatcaatattacagaatgattggagggcagtggaagaaaagtaaatgcccaattagagaattgattatattcaatattatattataaactcttgataacatgaaacttttcagatagaaatttgacaatttcaaaacttaaaattgaatattacgggtaatggtatcctttaggtgaatatttaaaaacactttcagtgccaggctagaattacatatcaggtagcatggggaggtagaggagtagtgtaatataagagaggtagagaggagtcacgagcccagtgccttatgaatttagagtaccttgcttaaaaaagatgaaccctatattttaagaagcttaaagtttatttagtcctaccatctttctgatattactttcatttccatattattattctaaatgttctttcaaattttgtttactattcttgttagaggaaactccctatattcaaagggagtccacactgttttcagcttgtcctgaagtacttgttttaaactaaagtctgatagcttgtttctttcacccttgggttttaattctacccaaccaatccaggtttgtggctgttggggtggacgagtagtggacacaatatctgtagcacacataattaaggttcaaaaaacatatttctttggattaacagactttattcatacctatatagcaacaaatatgctatatagcaatgagatgcctgcatataacattattctttgtttaatatttaatattaaacagagaaacataaattttatcatatctttctgtgactgaatttcaaatgactgtaatttgtctaatttccttggtatgcctttattgagaatcccttataatattattaaaaacatttcagggcttgtgatttgtaaaattatagtttctgtcttgtaactaattttaatgtatttttattttctataacaaacccctttatcatgctcacattacttgtatgttatgcttttacatttaaaaaaattatttgctttaatgcataaattttccaatcctgcggctgctgcagaggttaaaaaagtctaccaagaaaacattcaccatgaactctcgtgattagtttctttgtgtattgctccagagtaaaacaaatcagcactagaaggaaaatctgttctgcgaggtcccacactgctggtctaatgacctatccccacaagaggattgaatagagtagatccactgtggcttcccaaatggctgaggctggcagcctctggagatgaggaacaacagctgaggtgatagagaaaataaaatgttctgcttgaatgcaagttatatttgcctgtcttcctcaaccctctttcaagaaatgttgccatttcagaccaggacagctgctatttttttcatttttagtttttcagtcaaagcttcatggaaaaactagacttggatcaatgagacttatcttcttgggccaattaatttcctgtccacagtctcttaaattcatctcaaatctaaacttccttcagaaagcttccctaccgatgaggtaacatcacatgtcttcttggcaaggttaggaagcagggaagccatatgtccacacccgcttccttctctgcagatctcatctaggattgaggataaagagagggtgtcccctatattttaattcaacttttcatctgtttattaaacttagtcttatgtctttctttcagttatcatgattttacccttactgttaacttcttataggagacatctatgtctcataaataattatattaaattcattagatattagattcataaattagtagatattatacacaaaagttatttagcattgattcctatacgttagagagcagattaaaaatatttaaaaagatacacaattgtggacatgcattcatataactgccagttacaggtaaaagcaaaacataaataaataattgtaattatatactagtagtacctatgtatattggcagaggaaatagaaaaaggaaaccgtataaccatgattaaatgtttagcattgtcatggctttggaagctgccatggtgcttagatacactagacacatcttttgaaaaatgcattttggaaaaacatggaataataactaagattctttcagttttgagattatatttagaatccatttatgaaattgaaaaatcttatttcatttagataatattttgctttctttgctgactttaagtgcatgggaatcaatagcagaaacatcgtcatctaaccccagccttagtaatgtatctttgtctttaagaatacggtctttctctctctctctttcctcctacccaaccccgccccccaaccttttctttctctctttagtggaaagttacaataggatatatggtgattctttaacttttatcattaagcaagatattaactacatatttcaaactttgtcttatattttttatttaaagtaaggtggaatacaaattttttctcaaataaatatttatatgaggttttgtaaccatcccattatgttgattttcaatagtaataaatatctaattcaatattctctcatcactttaattaaatgtgagtaaaacagaaataaaaatgttaattaactatatgtaagattatcattaatacatgtttaagctggcttttctccaagctcagcagtgcatttgaagatcacgttaatgctccaggtaaacaacagaagctaaaacaccaggagaaactctaatgcaaatatgttagacaatgttccaaatagacttgagcaagaatttctattataaatcttttcagaaagtgcagtttcatgtgagtgtatgtgtgtgtggggggggagcggttactaaaaaaacaaacctgatgctcttagtttagatattactagcacccagggagtgcagactgtttaagaattcgggttcggtagccaggctttacggatcggtcccagcaccacttcttcatagccgcatctcatctgataggggactgaagctttctaagctttagttttctcagctctccaatacagataataattttaataatatcttccttacagagttcttgagaagaatatgtgagataatccagctatcagagatttctgatctacagagaaccttttttcaatattatagaataatagataattagaaaagatcaccaaatttgtcatcatgaagaacaggttgggctcgatggactaagtttagagttctctatattttaccatactttgaattttttgttataatatttttttatttagttcttttggaataaaaacaaacccttttttaaaatgtgtttttaaaatatgtttaaatttccgtaggaaatatataaggcatatttgctgctgtagctttaaggggattgatacaggcacaatatatacccctaaaatgaagaaagaaacaatgaaaaggagagtaatgcattagaaacaaatgcaactttctgttcagtcatatttggaacaatataagtgcaacactttctgaagtaaatactcagttcatcagtgattaagatcatttgttcttcttatattgctatagataaaataaccatatttgaaaagcaagttccaaatgtatacctctaattgtgaatctagtctcctaataattcttgatattagtatattaataatacacacatgtataccatatgtaacgagtgtacacacacacacatattgcattcggagcagtcaggtcatcttaattaactggattctctggagttgacttttcttcttcagtctaattcctgtaaaaaaatgagctttagtccaggcgtggtggctcacacttgtaataccagcactttgggaggctggggtgggaggatacgttaaagcgaggagtttgagaccagcatgggcaacagagtgagatgcctatctttacaaaaatgaaaaaaaaaattagccaggcacgttggtatgcacatgtagtcctagctacttgggaggttaatacaaggaggttcacttgagcccaggagtttgaggctggagtgagccatgattgagccactgcacttcagcctgagtgacaaactgagacttagtcacaaaaaaaaaaaaaaaaaaagaagagcaaagaaaagaaaagaaaaacttgtaggcaccatctgatgtccaagcagtttattctggcatggctctcacaagacagatagcaggacaggctggtagcccgggccagtcacaagatagatagcaggacaggctgataggctgggccagattcagtcaggagtcagatgaccaactcacggggaaggtctccctccggagaccactctcagagtttggaagattccttctcctttcttgtaactatgttcaatccagatcacttaccagatgtttctttcatgaaggaagtttaagctattcctgtaaagttatgctttaagattcatgaagctttaagattgttcattcatgaacaatctctgtgctgaggtggcctcctccgtagggcaaccaaagtttttaggtctcattgtcataaagacatggtaatcccaggccagagttggaataccccaagttagattatgtcagattatatcatgtgctaagtggcacaggatgtaggcccagcgggatgtttgagtgggcctcaaggctatcattaatcctatatccacaatacgtgccttatagaatactacaacactatatgtaaatgagagatgataaaacaaatcttaagaaactctattaattttaacatggtgtttagaaatctgaatggaatatttggttttcttcagggaagctttggtggtggtggctctgagatttggtgctgtcctggtattgggctacactggtggccttgggttcatagtaaactcttaatgactatagagctggggttctactggggttggtggtgggtctgcctgggatattccaggacagaggaggattccaaataaaagaaagaaagcacaggccaatcttttcataggagagactcagagaagttctgcaaagccctttgaattctgaaatgttattactcttatgtattttagataaagtatcaaacttcagaacacacagggtcataagaatagaaggtttttactaatagagagattattgcatttttagtaaaaaaatgactatttggaatattttctagcgttgcatttaatatttctatttctaaatacttaatttagaaaagctaactttcatttatttgcttaatcattcagtcagtatatgatacatacccactgtcctctagaatgactgagcaacagagctgtatagaggaacacttgggaagaggtagattttttttgttgtttcaatttcttatatgccaattcctaactctccaagttggcgatatctagaacacatgggtttgcatgtcaggagtcaggttattcagaaaagacattgccaaaaatgctgagttttaagggtatgcaaatatttgcagttaagcaaaaattaaaatatatttcaagattaaggctatgtgtggtggcttacacctgtaatccccacactatgagaggctgaggcaggacaatcgcatgtagccaggagtttaagaccagcctaggtaacacagtcaaactctctctacagattaaaaaaatcagccgatgtggtggtgcatgcctgtagtcccaggtaattgggaggctgaggcaggaggattgtttgagcccaggagttcaagtctgcagtgagctatgatcatgccacagtactccagtctgcgtgacagagtaagataccatgtctaaataaataaattaaaatataagattttgcgtctattttttcctttggccattgagtgaatatgatgacaagcatagagccccaccaaaatgagtgtaggattaagatggtatctgcttaattggtaggactgctgaatttcactgccaaagcactatgaatcaatattatttgcaagtcacagtgttttccataccagcaccatgggcttcaagggaactactgatgtaatttagggcaaataccagtaatgatgttgacattagcagtgtgccaggctgttaataacttttgctctagtgtactaattcatacaccttatggatttgttagcatagtatcaccaacaaaatctagaacacactaagaggctttttatccacttaagtagcaaagtaaaacaaaacaaaaacaatgagtcatcaatgatatgttttccattaatttggtatctgcatgaatctcaaaaagtcaaccattttcaccatagtgatctaggtaagatttgctgggatcacataggaaatcagctacccggtgattagcacatggcaagatttcagaaaaatacggcatcagaattgaagctttaaagttttcaagtgcttcagatgggaaatgttaatttgtacaatggtggattttattacttaaaattacttaaattacttaatcttaaaaatgttcttggagaaataattacttaaaatgcaaaaatatctcctatcatttctattttaatgagctacatatttgctttagagtacctattagcacactagaagctgtcaaatcgttctcagaaagagtggaagaattggccaaacaaggatgtgggtataggcttctatcatattgttgacattaaagaaagccagaatcccttaaaaggcccattaatggataagcaattatatttttaattaatttagggctataactctgaggaaggtaaagtttagattatcaattatttgctactcagagatataaatatgcttttatctactgccgtccttggctgaaccagttctagccacctatttttttctagtcttgtattaggatgtcttatgttacttaatttattagttatttgataaaaataaatcatataactgccaccttgtttaattttctgtatggaattaatacattttttatcattcgatagtcaattttctttttatactcataatttttttaattaatgttgattgtttctcttatgaaacatttttctcattgcatattagctattacctaatgaactatctggattggctgggggagttagtaaaaactgagtagatcagcaagaaaatgtatttatctcagataattcttccattacaacttaaaaaatgtatatttttagtatatgcaccaattatcaataattgctatctcagtattggattcatcatatctcatccccaatcttaaaggacaaaaggttagggtgtgattttattattttccttatttctcctattatattttaaaatgtatatttagctggatgcatttcatgtttctcttagtagtatgcaatataacattttgagaaggagataattaaaccataaaataatcaaaatttaaaaaagtgaaaaacctgaatttgatttttcagtgagtttgatgagttgtgcaaaaactaatttaagataattgtgttaatgcaataaaatatttattataactgcattttattttctggcaatctttaagttactacctgtgttagtacatggttcactttggtttgagttcttaactttcagtcataataaaaaatacagtaaatcttatttttactattttttctaaataatgcttttaaatgatttttccctgaacccgaatttaagaaacgcatacaacagaataactggaataaattatggataaatatttcctttggttttatttaatgaacaacttcatgttactgactacatgtcaggcactggtctacttcatttcatcacaaacaaactagaaacagatttttttttagtctgtattacagatgaaaaaaattgaggctacgacaaatttaaatacttttactaaattgacacatctgaacaaattggcagattcaagacatgaatccgggcagtctatacttctcatattccaataagtaaaaactattcacatggcccaaagagatgaaaaggaactgtgggatgatatttctctgggccagtgcttcctacagacagttccagagaatggcagaaggaacctggattccaggaggacagcaagccacctctgtcacagttgtgttacataaatgtgagccaaattcgtatttatacacaggaaatgctattggccagttcactgattactgtcagtcttagtaatattatgaaaagtcagtaagattatatactttcttagaactgtattgtttcaacaataataacctcatgatgttctccatttgaacaaatactgttatcttaggaatcgtatatatgctactgtttactgaattagctatttctattttctgaagaattttagcccaaaatgaattactctaaataaaaaccaccattcttttctcttgtaaaacatatctggaatttcaaaataaccttttcccaaaaaatacttctagcttcagaatttggcaaaagtcacgcctaatttaacatcgtgaatgtaacacaattacatttttattttattagaaataaactgttaaaacagctttctgtgttatttatctgcctagcttatcatgaacaccacattttgagtattaatcatcatatataagccacgcctggtgtttagcaccagaatttccaaggtagggagattatttatttgtttgtttttcttcttattgtggaatattttggggcttgactttaatagccatactctggggtaggatgtgttcaaatttagtaaatgctagatttaaaagtacaatgaataaattagatgtagtgcttctcagagactttgctctcaaaaactcttgcaaacagagtattaccaagaaaatgatttaacaggcagatgttaaagtttgggacacactaatttacaccgatataactgaaggtatttttaattcaggataccgtaaagaactgttaagaataaaagaattggtaaaaaggaatgaaaacttagtatattttactcttcgttaactcaatacttctcaaatgttttcaggtcttgacacagatagaaaatgacaatatttatatggcagcaaactagtgtaaataaataaggttgcttgtggctggaaactataggtccagcggctctatctgccttaaaagggccgaaaggattattatcactgtgcctgccagttacggcaaaacaagttatggtacataaaaaaccaaggcaaacttgatcagtgtggctacctaactgctctctgttctggtctgttgcaattcttttttttttttttttttttttttttttgagacagagtctcgctccgtcgcccaggctggagagcagtggcgcgatctcggctcactgcaagctccgcctcccgggttcacaccattctcctgcctcagcctcctgagtaggtgggactacaggcgcccgccaccacgctcggataattttttgtatttttttttagtagagacggggtttcaccatgtttgcaaggatggtctggatttcctgacctcctgatccgcccgcctcggcctcccaaagtgctgggattacaggcgtgagccaccgcacccagcctcaattcttgtcataagacgttcctttctctttgtggattggagtattctgtactctatgcctgtgtgtgggtatctgttatctctgagttattcctgtttgcataaagttcttactgttgcatcttcgaatgctgaagggtttattttataagtttaatcttagtgttttgagtaagctttgtgaaagcaaagatttcttccaatatgttttgtgcgtggttggttgcctgtaaatggaatatagtcactctgtcttgctaatctgagtttttgcagtcctttactggatgccgagacctctagcacactgtagcaatgggagggacattcaaaattattttgggaggaagggtcttatttattatttgatccagttgagagtagtcctctcttgcacataaatttagatacatggcacttccaatgcaaccctcaaagtctttcccccactataaacttttgagtcattttatgccccaaatcttacaggacacactaaaacattttaattgtgtagtttaaaataaacatatgcttttgaatatgttttgcaagaaaatttataattaaatgagctatttcctgtttaaatttagaggctagaggacagttgtgacattttacaattgtttctcatgattaattgaaataagcataagaaggtgaagatctttccagctgtgaattctctgtcagagtgatttttcctaaattgctcacagttgttctactatttgtcttttcatgtaaaatcactttacaaacaagggtgaaagtccagccacttttaatgtttgaggtctgtaaaacaattcaaatctcctcttaggaaccagaacactttttaggaccagattttgtatcactttttaaaatacaaagaaaataaaaatgtttttattgtattattccagttactttatcatttttcatgaatttaagtccgagaataagcacagcttaatataaatttactgaaatcagttttctactatcaaacactttgtcatactagatactatagtgtgtatgttggtgtctcttcaaaattacatttaactgagaccagaaaactacataacagctaaactcagcagagtagtggcagatgggatattcagaactagacagaatctagagagattttagaagtagaatctatagatctatgtatataagaaatgaagaaaagaaagacaccaaagattttcatcttgaacaacttaggtgatggggatgctatttggtgagttaatgaagaatgaaggagaacaaatgtgtgtgggaagggtttgggtggagaggaggttgagtaattaagtggtttatgttaactgtttcttaagtttgagattcttgtaatataactacatggcaattttatgtacctacatggatctggaggtctgaggcttatccgtattactgcaaatgcctttaaaataactgttctttccatccacatataatttttctaatctgtaatgagttggattttcatttattctgtacagagagtactaagtatttactgcatgtttactttttaaatataccatctatatgctacttggcccctctacactgctttcttggaaataaaatactgtgcctataactgctccaagtacataataggcactcaataaatgtttgttccatgaatgcatgaattaatagataagtggattagagactttaatgagatgtgtatatttgtttttttctctctccagaagactgatagctggtagcaaagatcttgtcttaatcttctttcagatcctttaagatgtgtaacactctagtggacattaaataaatactcattgattcatgggtattaaagtgagacacactggttgagttgaatagttccacaatctgtcttcaaaaaagtcatgaattttactttatttttaaacatttaacaggaaatattgagagaaagaaaaaaatgtatcagtatacaaggatggagacaagaatatacacaaatgtgaagacactgtaaatctagaaacataattttagaggttaaagccaaagaaaagagacatgcaaaacattttataactaaattgtattttgcaactctttttagctaaaatttaattatcatcatactttgcacatatttgaacagaacctatacactttgaattatacttatttgcttacagatgatttactctttctgggaagttcactccttgtagccccatcatctaactcagcacctggcatacaacattcaatcaataaattttctgctgaatcaattaatggatgtaaactgctgataattattctcttttgatctaaaaagtttgtcatttagataaaatgtatgtttaaatatttactttaaaacgaataaaaatatagtatttaaaacttaagcataaatccctggatataggtagcaactattaaaaccacagctgggacagtgatttaaacaatctttcttaaaaaaattctttccctgccagcattgtcattagaacattagcagtaattaaaaccataagtagaagttctagatgactgagcagctgagaaagagcaattaaacatcatagacagaaagaaatttacattttctacataaccattgtatatatattaaaagaggcattagaaaccaaggggtggggggaagcaacaaaaacaacaacaacaacaacacaaatagaagaagaagggggacagatcatctaagaaataataatagtgaatagaatatttatgtattttaagtatttcagtttttaagtttttaaacatccaaaattataggcgattaagcaaagattatgtcaaagccttaaatgtatcaaattataaaataaactaataattatcttaccttggtttattaaattgctagaatgtcataattaaaatggccatgacatgcatgtttactttcctttaataccacttataaatttgtaatacttcgaaaaagagaaagtgagccacttagtgaaatatgaaatgcttcttaaataaaaccaaaactagaaacttccatgagatgaaaaaaaaaaaatacttgtgtaattgtttaagagaaatcatgagaaaataaacaatagtttatttagatctctttaatagaaaatttaaaaagaaggaaactaaaataatatataaatgttattagtaatcaaaatagtgcagtgcttgaagttccactttaggaaaaggcagaatagaattttctgggtcattactaaagggctaactttttcatgagctaacctacttcttatatttagtagaggtttaggtgtataaatataaaagatatggtcctgagctttgtggtgatgtaatgatgagccagcgcatattaaaaactttacagcttagtaaaggagacagatgcatacgtggtcagctgactccagaactccctcttttccaggatatagtaagacatgatgttattttatagataaacttttttaaaaactaaaaaccactgtagaaagtacttacttgcttatttatcctggccattcagtaagtagatagcagactggaattctttcactgtattccacaaccactctaaaagtgcttataaaaataatgtgggtgttctaaatcccatttgactcagcaatcccactactgggtatatacccaaaggattatatttcattctactataaagacacatgcactcgtatgtttactgcagcactgttcacaatagcaaagacttggaaccaacccaaatgcccatcaatgatagactggataaagaaaatgtggcacatatacaccatggaatactatgcagccataaaaaaggatgaattcatgtcctttgcagggacattgattaatctggaaaccataattctcagcaaactaacagaggagcagaaaaccaaacaccaaatgttctcactcataagtgggagttgaacaaagagaacgcatggacacatggaggggaacatcacacaccagggcctgtcaggggttgggggtcaaggggagggatagcgttaggagaaatacctgatgtagatgacgagttgatgggtgcagcaaaccatatatagcatgtgtatacctatgtaacaagcctgcacgttctgcatatgtatcccagaacttaaagtataataaaacaaatttaaaaaccacacaaaaaaataatgcgggtatgtgtgtcatgtctctaactcagatctccacctgtcctccttgtttattttccatttaacaacctaaatgagaataccttagtaactctccacattggcccagaatattctacttttgaatgcattatgtagaatttactgacttattccatagtaagaaggagaagtttccaccttatgcccacaggaatctttttatcagacctcatcaaaggtctcttgccttccatgacaccccaagagattttcaactgattttcaggctcctcttccctcttcctacaacatcctttcctccactctccagaactacacagttttgtcccatctgttaccttcctatcccactcaatttgctgcccaacaaacaaagtggccggcaatgagcaagaaacaccctcactagaacacagtaaaatcagcacctattgctctcaagcttgtcctttggtctgtctcctcaccccaagccaccctctaaactatttcttgagggtaccatgcactgcccttcagaggagcctaacaaataaaatatgcatgtcattacacactcatgacgctgctcttcccttgttaattaaacatttcacattaaattccagcaggttctaatccagtgatatgtcatatagattttcaatcttccctttttgacataatgtgagatttattcaagacggttttacaaagtattatttatttcagtaaaaatgtcaagaattgtttatttttatatatttatatttatatatatataaaaaacatatatatatataaaacatatatatatatataaaacatatatatatatatatatattttgagacggagtttcgcactgttgcctaggctggagtgcagtggcattatctcagctcactgcaagctccgcctcctgggttcatgccattctcctgcctcagcctcctgtgtagctgggactacaggtgcctgccaccatgcctggctaattgtttgtatttttagtagagacggggtttcactgtgttagccaggatggtctcgatctcctgacctcgtgatcagcctgcctcggcctccgaaagtgctgggattacaggcgtgagccaccatgcccggccaaaaaatattttaatcttaactaattatacgctttttgcaggttaattaagatggaaatcaatgcagcattgcattagttcatactcgttatttaatttcctgaccctcttctacatttcttggaactgcacccttccatttatagcaatgaagagattcttctttttgctagagtttagtggttattggcagtaaggcagtataaagcttgtgtagttccacttaggtagatattataaacatagcgtatttattctactgtataacttaaaatagcatatttattctactatatagcttattagtttactactgcataaatattttaggtttattcctttgagaaatctatgttaatctattttatctctatttaagtgctgaaccacacattcaataattgttttaaaggaaaatagcacatattttgttaagtactctgtactttttcataacggatctattggattttggccagtttctctaaacctgctgtaagcatgacttatttaattacctaagttgattgaacacttttcccttagcaatagattatctcaaactatatgctacccaatttttcttcagaagcatcataggctatttaatattttcttttctttgtgttctatactgttaaattactatcagaaatatggtcaaggattacaggcatcaatatattatgcttaataatgaattgtttggaaatggtaaaatgcaaaatgatctaatttagagtttgatattaaataatatgttgaaaaatgttcaattgaattaactcttggtaccattttctgaaatacaaaatgaagaattatcccattgtgcttgtctatataagtatagtaaaaacaaaaacttgcctaaaaatcacatttaagataaataaagagtcactgcttaggaaattaagtaaaaagttattttctcccattttgtgtcggggtaggatgggcaaatcagcattgtgagataaaccatgcaaaacattttctgaaggatgttgtcttggttcagtctaccataacaaagtgtcagaaactaatttacttacaagcaacagagatttatttatttcttttgaagtttggagtttaaaatcagggcaacagcatagttgggttctagtgatgttctctttcaggttgtagaccactgttttttcattatatcctcacattgcacaaaaagggtgagataactctctgaggtctcttttataagggtgctaatcccattcataagggttccactctaatcacctaaaggccctacttcctaataccatcacattaggaggctgggatttcaacatatggcttttggacagaatgaaacattcagttcactgtagaggttgaggtcaaagatgggtcaaaataaacaagctaagggaccacatgccagggagtcaagatactagtcaaaatgtcccaatagccctaggaaatacctagggaatcttgggtttaacagggaaggtttagagaatacttatggcagagtcctccgtgcctaccataaactctttttatcctctttgtgtatttgtttatttatttagagatagagtctcactctgttgctcaggctggagtgcagtggtgccgtcatagctcactgtatcctggaacacctgggctcaagtgatcctcccacctcagcctcccaaagtgttgggtaactcccaggctcactgtgtaggtgttcttggttcatttaaagggacaggcagaacaaattggtggtaagagagtgcagttggttcttataatagctgtttccacaaacttagatcttagcacttaacactatttttatgagaagctgttggtgtcattgttttctttatcattaaaatagttcaaatttaattgaattgaatttttaccaccatcagcagtgcagattaaaaagaaaaacagaataaacatctttgtttactaacaatttcattgccatccagagcaaaacaaaacaaaaatctaattttaattcccttattttgggtgactgcaggtaatgagttaccaggggaatataataataagctgactattgaccctaccattaactttcagtcctaatcattttacttagttttgtgttagcagtggagacaaatctgacaactcattgatgtgaagtaaacatgttttggctgtaaaattgtagtatgaagcctcacacaatatctctgcctttagctatgggacggtctagtgtcttttactaaaagtgaaatattctgataagttgtgatagcatatgcttaactgctaatgaataggatctctgtgacttgatatcacatttgatgaaacatgttaaaagatagattgttcattaacccttgaggaattataactttgtttatccgattatattacatttaacacaattttcttgttataaaatgccatctgaacatccattatcattcagacacaagcacttcagtgagaaaactaatgggcttaaattactaaaagttgatggctttctaaagtaaactaacattgcagattacttttgcaaaatatataaagcagtttctttcgagcccataacaggaaaaaagaaaatgagaaaaactgaattcaactcacatgtctcattcacatattttacttgtatactgcccggaggaagcccagatggctgaaatgttggcaggtttctgcacctgcaatgataataaactactcctctattacctgaagtacgtgagttgaatacaattacactttactcactgctatatgcactggcaggtcaacagtttatattgtatttttataggattggcaaatgcatgttgctgggctttgctgaattcacttttagcaatagaatgccaaaggccactaaagcacctacatgctgacacattaatcatgtgccaaagcttagcttggagtggcttattgctaccatgatatatagaaaaaaagtaacaaaacagcctatatgatagtttagtaaacaaatggatgctcctgagatcccaaatgagtgagcttaactcagtgtgagctataatttttaataccttcaaacaagagaagatatttgaaggactcagccacaaaccttttcattttgtgacattttttacaaaacattctcattgtatactatttgagaagtatagaaatgatgaaaaagtaataaacgttattcacaacccattactcacacactaaccctattgtcattttagtatttctttctgtatgtaaacataactggaaatatatacaagctaccttgtgcttttcttttttttgtcttttttttttttttttttttttttttgagacggagtctcactgtcacccaggctggagtgcagtggtgcgatcttggctcactgcaacctctgcctcccgggttcaagcgattctcctgcctcagcctcttaagtagctaggactacaggcatgcgtcaccacgccaggctaattttttgtatttttaatagagacgaggtttcaccatgttggccaggctggcctcaaactccagacctcaagtgagccacctgtcttggcgtcccaaagtgctgggattacaggcatgagccactgtgcctggcccatcctgtgcttttctaagtgatgtaatcattttcctatgtgattaaacatttctgcaaattcctctcactagacactcatcctccaccctcaaacactatcactttgttgactcttagtcttccttctccaaatctaatttcggtcaatactgtctcaggagtgcttttcctaactttccttgctagggcagtacctacctgtattaattgccctcacagtaccttaaaacatttcctttgttctccttatgtcagtctttatgttgttctcattcgcaaaaatttttgaaagaaaaatcgtagaattttggttggaattttgacaaacttataaattaattaaagaaatactgttctatttatattaattgtttctattccataagtggatttttcatcattctccttgaagtgagattttttcccatttccatttaatacactcatgttaaattttgaaaacataacctattcttatttttgttaatatttgagtcgatcttttacctattatatctttagctcatttcagttgttatattgtgagcctgtgacatctatatataatttattttgaagtgtagaaacatgattgaacattatataattttaaaagatttattacatattcatggatactatttacatacttagtagcaaatccattcattcattcaaaaatattccttggttacttattttgtgccacacactcttacggacataggaggcacagaaggaaacaaaaacaacaaaaatcctgtattacatggaggctacagactattgaagggaacatataataagataaataataggtaatatgtatttacattatgttatctggtgatctgctatatggagggaaaaaaaacaagaaagaggaataaggtaatttgatgggaatttcaatactaaatttagtgtctttgtcctatttgtgctgctataacaaaatttaaactgagtggcttataaacaacggaagtttatttctcacagttctggaggctggcaagtccaagatcaagttccagtctctggtgagggcctgctttctggtgcatagatagcaccatcttcttgtgtagagaggtagagagaacagagttttttagggtctattagggcatgaattccattcacgaaagctctgatcttatgactgaatcctagctccaaaagtcatcctttccttattccatcaccttgggagttagggtttccacatatgaaatttggaggaagggggacacaaacattcagactataacaatcagggtggtcagatgagtcttaaaggaagtgagaaagccgattttgtggattatcaggggtgaaagcaccacaaaatgaagtacacacactctgaggtgcgaatatagcttctgtcatctaggaacagcatcaaggccaatgtgtctgaagcagagtgagctagggggacagcagtgtgacatgaggtcacagaagtgatgggaagaaagaggcaaattgtgcccagtgcagtggatcactataagaatattggggttttcagtgagcaggacaggaggtcattgaaagtgtctgagcataagctagtttttggcaggatcactctggctgttgcgttgagaatagactatagaaggtaaccagaaaggtcagttaggagtctcaaaaatccaggtgagaaatacttgtggcttgaagtatggtgttaggagtataggtagtgagaaatgcttttcagtctatttccaattacatatcaggaatttgtaatttgtaattcctgatatgtaactggaaatagacctaaaagcatttgttaactgttagatgtaggatttgagagaaagataagagttaagaatgactttctggtttatggcttgagaaaggatgaagttgacataaaatggagtgggaaaatttcaggaggagaaattcaagaaggaaaatcaggaaattctgttttaaacatgttaaattggagatgactgttatgcatgcaactggagatgtggagtgagcagttgtgtacatcccctggaggtcagggggtaggtataggctgcagatacaaatttttgataaaaaagttatataatcttaaacatattagcttatattttaatcagtggatatttgttgatggtgatagtaataagagaaattcaatgtaacaaatatttatttgtcaggtgctaagatataatgattaataagacacatatggttcttggcctcatccaaattaaaatatatgggggtggatagaatattttgcattttttataatttatatttcttttaataagataaagcattcaaagctaataatatcataaattaataaaaaataacttaaaagaaaatttaatataatatgtcctgatatattaccaaaaacatgtattcaccttcatcacttacctcatattgacatcccttccatcctttcattcaatctactccatgctacacaattgcaataatttttattaataaatatcgtgaataaaaaattatttatgtaagttattcttgcttctcagagctattttcactaaggtcagataaatcactttgatcataattctgtgtattttattctcaaaactttctttagctaatgatgtctcatgttacatcaatgaattcactttcaccattttacttagcagtatgacactgaccattttggtcctctcaattaggatatttcttattctccttttaattacttcactgctatttatttctgagtgcttatcaagaaaatataattttataataacttaataagaggagtagaatctctctaactagatgattctaagcagtttggtatcctttatgttgtatacttttcatagaccattgaaatgaaaatcttaggaaaagtttttgaattacaagaattgaattatatttccagaatatttctgagcttgtgccaacgtagtctacattgtgagcaatggtgacaatattagttccccaaatgaaaacaacataaatttatattaatgtttattttatccagggtaatcatagtaacacattttttggcattattaattttaattaacctgttaattgccacatataaatgataccaaattttttctttctataaaatgcatatgagccaaactactcttactagattattttgactataagatgaaatgtatagttaacatggagtgacatgtttagtaacccaggtaaggtatcagaatggcttggtccatagtgaaagcagcagaggcagtgataggtggtgaatttgaatgttgattatacagttgctagtattggatgatgtcttttctagtgattgaaaaaatggaggcataagaacaactcaaatttttttttacctgaaagactagatgacagagttattcactgagatgtggaagactgaaagagctggttaggagaggaaatgttatcaagaactctgcttcagacatgctaattctgaactgcttattaggtattcagtagaggtgtcaagtcagttaaatgtatgggtaatgggttgagaaataggtatagtctggagacataaatataggcattgtcagcatattgatggccttgaatgactaagataagatgaaagcattttataagcaggtgataggcatgaataggggagtagagtgaattctgtttaactcacatgtggtctttgtaagtgaggagatgaggaagttgaaagggaatgtaagggattgctatggttggaatgtcccctccaaaatcatgtggttatttaattgccaatgtcattgcattgggagataaggcctttaagaggtgattgccaatgtcactgcattgggagatgaggcctttaagaggtgactgccaatgtaattgcattgggagatgaggcctttaagaggtgattaagtcatgagggctctgccctcttgaatggattaatgcccttattacaggagtgggttaattactgcaggagtttggttctctttttctctctgtctcacacacttgcttgtccttctgctcttctgccccaggataatgcagcacaaggccttcagcagacactagcactttgatgttagacttctcagtatccagtaccatgagccaaatacatcattttctctataaattacccagcctgcagtattctgttatagtagcgaaaaatgattgaaacagaaagtgatcttggtcacaaatgtgccaccaaaaacccctaaacagcacttgataatacatatttgctcaatggatcatgaaatctaagccaaataaaatcagaaaagaggacttgtgaggcttgaatgacaatgaaagtgtagtagcatctaagaatgaaatgttctggttgcatttgagtcccagagagagtggactggagacgtgggagttggtggtcagcaagtagcatgtgtggaatatggaagggctgcgtgtattggttatgaaaacgtgaagagcacacccacagagtgactgagaaagggtagagactgggatcttaggacgagagtccaggaactaggagaatgatgggaatgatcatctgcatgaaaagtaaaaccaccagttcctttttcttccaagttttataagagttttatcatgattgttattaattttataaaatacttttatgccttctttaagatagttataagcttttcctccttcattttgttagtatgtcaaaatgcattgattactttttctgtaattataaacaccttgcattactggactaaacccaaatcagcaggaatgaattactttttatttacatcaacggattcagtttgctaaatattttgattagtattctttgcatttatctttatgaggaatttgcctgtaactttcccttcttaagtatttcttcagttttgggaaatttacagcaattatttattgaaatgatactactacaccattccattatgctggatttactcttatctatatgtactggaggctgtcagcttagcctctggttgctcaactattgtcctatttgtaacatatctttgtctttttgagtgatttgctagtaaattcctcaacaacagcaacaaatttagtaattccaagtacagttcaagtgactgtactttctaatactatttaaaattacttctttacatattgacctttttaaatttgttttataatttcttactttatgtcaatggaaattattccttcgtttatcactggaagcatcttaaacacactttagattatttatgtaactgatacaaaatattattttttatgcaattttctttgaatattccttggaagctagaattttcttctttttgctatcttttttctagcctttctcctttttattccaactctcacttcccatctctgtattcactcttccagtcttgaggttgaacattatcttaatctctctagtcacttaactccctgggctcccagcccagaaccactttttaaatcaagacattttaggcagggcactgtgatccagttagagaggcagtttggtcagttcttgtttataaggctgtgtctgtgttctcactgctacaggcctgcaagctgtttgaagccacagcccaggtggtgtgaatttttattcttagcttacttcaaagaactggagaggcttactccaggccctggcttcaagaactttctatgcctgctcctgtctctgtctgggagcactgaagtctctttcactccctcggaacaaacttaagacctgcaactaagcagacctgtagttttcattgtatttgcttcttctctgcttactttatttatttaaaagattggtcctccaaataaaatgtgtgtatgttgctttttccttcatatttttattattatatgtttgcaaagaaagcatggagcaaaaatatgaactcctgcacccacttatgaggaaatcctgatacatctgaatcagtttttcttgatggaatgagtgtttattagtaaaatacgaaacggaataaaaacaaataaatacttagtgcactgcactgacattttcaggagaaacatttttgaaaattttacatgtggaaaaaaagtttatttctgcaaatgataatatgactgtaaaatttttgaaaagcttataaccatctctgtatttttatgagcctaaactgtgattgaagctgtgttaagtcacagctggtagttaagctgtgagagggacgcagataaatgcacgatactacttttacggaacttaaactacaatagatacaatattatcacagaaaactataataaatcatagacatggataaacctgaaatgagatctatatttaaagaatttcaagaaatatgacatttcagtgagagtggaaagcaacattttcgtgcaaaactatgagatagatagcctttcaaaataaatagaattttggaactgggaggtttgtagctaggacactatgaacagagggagctgtaagaagagaaaccccacttgggaggctgaggcaggagaaacacttgaacccaggagacagaggttgcagtgagcccacatggcgccattgcactcttctgggcgacagagtgagagtccatcttaaaaaataataataataatgatagaagaaaaaccccgaagtggacaaattttgcttgcctaccagtaattactaacattttactaagaaaggtaaaataagtgtaggtggcaagagatcagcatatatttgtgcatgctgaaatgctattagcttttctggacctacccaccctgttaactgagtccatcttttcttttattggagctaatttttgacatttaaaatccttctgcaggtttcagtcactcactggcctaactccatattcaaagtttctagaacagttttcttgattcattggagtcttatttaattacattccttccatagccctgatttgtgaattttatgccatattattattcacttgttttcatgttgttttgcaattatcacctacgtattttatatctgtacgtttagtctccttcaaataaattgcaagctcttaaaaatcagtacaggcactttgtacttctttggaacttcctctatacatattcagtgttttgaaggaatgttttaattaataatttatgtatttgaaaaaaatatatattataaaaaagaattcaattttacgtgttcttctggtttttttctccatttgtccccattattctctttctactttcaccatgactgccctactctctctctatctgaacacataaatatttattgtacatatacatacacacatacgcaaacacacatataacacatacacacatgcacaaacgtgcattcatgctatacagatagtatattaagaagtagtcatttcttataggttcaagtgtgtgcaattttttaacaggataagttctagtagaatgaataacagcatgaatttcacaaattatgaaaaaagtagtcatttctaagagggataatatataacatttagtataatcatactataaattcccttattattatttttaggcaaagacaacatcttagaaagttagagaagtaaagcatctttaaaaccctcaagatagtacttttatgtatgtgtaaaacgtaacaactgtatgtctaagacagtgtctatgtctacttgccgtcaatcaccttccttcttttattagtttgagatagaagataaacaacaagactgacagttttgtgtcctttgctgttttgtgtcaccatcacagacaaaacagtattatgtcatcactcaagtctgtcacatttattgtgtgctcctatatgtcttaaagactgttttcttcctaatcctcataaataaatatataaagaatatattgattgtatattattttatcgtggaaatatttcccataatattatgacctctaccacagatgagaacatttatgctgttgccagtctcaaaagtaaatgtattttgtttgaaaggaatgtttcttagataaacaataaatattttaaaaagaatttatttttcaaaatatggagaagctgtaatgaatatctacatctgtgtaatatgtaaatcaagcatagtgaatgttattattttatcataagaacttaagcatttagtgctacaagaagaaatactttgaaaatttttaaattatgcttattttatgggccgtttaaatagcattgtacacttcttcagaaaattggtatctgatcttgaatagtgataaaaacagtgaatcggcaagtataagaagaccttcacgtgattgatataatcaccacttccttttcctttttcttgtattttctggagcctcatctatttccaccttgccttactttcacattttaaaatgagatcttaggccacgtttcttgctaaaacacagtctaaacaagtgaatcagctctacagcttcaaatagtcaatttcaatagtaccttattattaaggtaccaacaatataatttgtgatttttattttatatcttctcagtgtaacattttaaaaatagatagatgtaattaacttagctgataaaaatttaaaaattcagaaaagctcaaagaagcaagaaaagagtcccaaatttcatcaatccgttagatacattttctattttattatagaatagataccatattgaacattttattttacatccttctgttctattttcaattaaagttgtattattttcctattataaaagttttcaggcttataatatgaaagctttctaatgttccattaaaattataatgttggatatttatttatacttttgcattattataaatctatgatgacagttttcttcatacaaattttggttaaaacagaaacgactttcactagaatgatgagagcacatcaattcttacctataattgacagcctgttatcttgattgcctaatgaatttcttaggtaaataggtaatatttttctgaggccttgaatgtctaacgattttctattgcaatatcatgtggaagataaattggttggttatgaaatttttgtcctcaaagttgtgatgaaattactcctttgtttttgagatttaataactattctaatgaaaacacaagtgacttttagccacagaaattatgctactaatatgccttcaattctgttgtcatagtgttatttttctcaataatttgtgtttgtgtgtaatctttcccttctcttgtatgtactaccttatcttctgctttctgagctatctcaagttggttaacgaaatcattgtttccattttgcactgcatttacatagctttgactgctttgagtttggacttgaattcttttgcacctttatcttcatctccatttttaattggatcgtttattgtaatatttcagattaatttttctatgtgtctttctgcttttttattggagtttatatcttcttacagcatattgaggatttaaacatttttattatatttttctgtttttttgtagcaaattctatagtaatattttaagaatgatatcccttttatgataaattgtatttttcatgcttcccatttactttttatttaattcatttttgtctgttatggtaatgctaacctcactagttcagctaactcgacagaagctctactaacttcttaaagctcggcaatgaagtgaaatatgtcactttactcacttttttttggctgaatctggtcacatgacagcccttcactaagcaattacttactgaatttaaatatggaataaaacttttttttttagaaaagtagtcagcttcgttccattcatttttagcaggaaggtattttttcagatacgatgtgtgatgacaggagacattaatattaccctcaaattcccttttgttttacaattaaatggtttataaatgtattagttcttagcccaatccctaatttctaggtgaattaatcacaggtggtcccatagatctcatatgggatttcaactttcctaatttttgtggggtctcagatacttctaacagagctctgtacaaccaccatgctcgtgattcattgctgttaaagttcttgtttcctttatctgcctacattttttatattgttattattattattattttgagatggagtctcactctgtctatcaggctggagtgcagtggcgcgatctcggctcacggcaagctctgcatcctgggttcacgccattctcttccctcagcctcccaagtagctgggactacaggtgcccgccaccacggggcctggctaattttttgtatttttagtagagacggagtttcaccatgttagccaggacggtattgatctcctgacctcgtgatcctcccgccttggcctcccaaagtgctgggattacaggcgtgagccaccgcgccctgccctatctgcctagattttagttgtgagttctgaaccttctcgaatataatctaccactgccaatcccaatgtgtatggcaggagattacttttatactgttaacttcttactataacataagatctcctgggctcattagaaacaattctgatcacttcaaaatgcagcactgacttggtattttctgcttggtaaaattccttatatatcttgaataggtagatgcatagacaaagattcatttagcttgtttgggctaactaactttttgttgttgttgatgatgattttttttttttaacttttactttaggttcagggtacatgtgcagatttgttatatgggtatacttgtgtcatggagatttgttgtactaattattttgccaccaaagtcttgagcctagcacccactaattattttttcctgatttctccttcctcccatcctccatcctcaggtaggccctagtgtctgttcccttctttgtgtctgtgtgttctcatcatttagctcccatttataagtgagaaaatgctgtattttgttttctgtcctgtactagtttgctaaggatgatagccttcaactccatccatgatcctgcaaaggacatgatcttcttttgtatggctgtgtaatattccatagtatatatgtaccacattttctttatccattctaccaatgatggacatttaggttaattccatgtctttgctattgtgaatagtgctacaatgaacaaaatgtatgcatatgtctttatggtagaatgatttctattcctttgggtatatagcccataatgggattgctgggttgaatgatagttctgtttttagctctttgaggaatcctcacattgctttgcacaatgattgaactaattcacactctccttcttataccatatacaaaaaaatcaactcaagatggattaaaggcttaaatgtaaaacccaaaactataaaaactctggaagacaacataggcaataatattccagacataggaactgacagagatttcctgatgaagatgccaaaagcaatcacaacaaaagcaaaagttgacaaatgagatctaattaaacttaagagcttctgtacagtaaaagaaacaacagagtgaacagacaacctacagaatgggataaaatgcttgcaaactatgcatctgacaaaggtctaatatccagcaactataaggaacttaaatttacatgaataaacaaccccattaaaaagtgggtaaaacatgaacagacagttttcaaaataagatatgcacatggccaaaacatatattgaaaaatgctcaacatcactaatcattagagaaatgcacatcaaaaccactaaatgttttttaagtctggttagtctatcatcagccttatatttaataagataccattcacagtttttctaacagattgaatatgaggattagtaattattagctaggaagttacttgaatataatatttaagagatctataggctctagagtcagactgcctgaacactcatctgtgctcagatatatattatctatgtaactttgggtgagttactgaacctctctgatgtttaggtttctcatctttagaagagaaataatgctagtgtaagtctcaatgagctattgtgaagataaaaggtagaaaaatctatataaacacttagcaaatgttttgtcagatagtgcatactccataaattaacattactctatcgttgtcatcatcatcatcatcatcatgtgatttttcctctatgtgatgatggttttcctatatccatctttgatgagacattaggtttatctactgcccttgtattgagcacatggttggtaggcatccagttctttaagaaatttttaaatggcattttcttttgtccagttggaaaattccccaaaatatttgcatggtggtgtggctattcaaaatatgttgtggaatatacaaacaaaatacagtttattagccaattattttcaaatcgtgtatttttcttattctctcctgcattggaagactattttatacaatctttctttcatactgtccccattacctcagtgaaagctccctaagagagagccagcatcttttctacagtgtaagctggttgttgggctgcctatgtgaccaaggccaagtcaagctcaaagcctgtaagtctagatctcaaagattcatatgacagtggtggagtcagcaagtacagaagactttgaagcagtacatatcacactatggatttccctcttgagaattagtaagagcagtgtgtgttcagagctttctctctgggtttcagaagtcacctccacagtatatctcatttcaacctagctacaaagtaggaattcacagttactgctgaaccattatatttaataaaacacaatgtgttcttttattgtgaatttcacatgtgtctaatttgatgtatattttttccaatgtttttggtaagttttggaacatttcttatgtgaattactaaaaaaaaaagcctttattatactcatttataaaagatgtttatcaaattacctttcatcagtcactttcatttgccccaggagttgcaacttcaataattttaattttgcattggctttttgtcctattccatcttaaactgcccttctcacttatctatatatttattcatacatacaatgtatacatattattgtatttatatttatactttatataaatttatgtttatatttatacattatatatatataatttagatacattcagtactatatatcacaagataaatatgcttaaattttccaaaattttatggtttagttgtggtattaagtattaagatatgctgtctctcgtttttacacttcttttttgtgccttttgctaaaacttcttatcaatttgaatgtcatgaatttttttatacattgactgtcttagtctattgcatgttgctataacaaaataccacagactgggtaatttacaaacactagaaattcacttggctcatggttctggaggctgaagtgtaagaacatggtgctggcatctggcaagggtctttgtgctgtatcatggcagaaggtaaaagggcacttcccaaaacttctttgttaaagtcattaaaatgctccataaggaagagccctcatgacttaatcactctttaaagggccaacctcttaatactgttacaatggctattaaatttcaatgtgagctttggaggagacattcaaaccatagcattaacaaaactactaaatgttaacatgtaacttagtataaatagaattgttaaaaaccaattcagatcactctgtgataaagaaaaataaatcatttaaagaaagaaaattcaacatcatagaaaatacttcaaaaagtaggatgtcagccaaacgtggtggctgagctggtggtcccagcactttgggaagccaaggcaggcagatcacttaaggtcaggaatttaagaccagcctggccaacctggtgaaacttcgtctctactaaaaataggaaaattagtcaggcatggtggtgtgtgcctgttatcccagctactggggaggctgagacaggagaatcgctggaaccagggaggcagaggttgcagtgggctgagattgtgccactgcactccagcctgggtgacagagtgagtgaaattcatctcaaaaaaataaaattaaattaaatttaaaaagtaggatgtcattcttcaaattctatatagtaaatgataatttttaaaatttttattactcatcactttcacattgaatttttgatgtatgtgagatattagaaacaatattcattataatcagtaatttgctaattttttaaagataatattttatttgtggaaaattcacactcacctccttcatccccaaaagggaaatattagtaagaagtggggaaactgagggaaggaagcaagatcaagtggtgaaactttccgtagcaaaaatatattggcaatgaaaaatattaaactcatttcatagaaaattatggactattgttaataaaatttatattattttaatatttttattcttatgcctacgttttaaaaatataaaagagaacagtttcttaattgtacaacaagtgcctggattttcagtttgtgtactctaagaagttgtttatttcattaaataattatgttattaccttagtgaaaacagaactgtgaaaaatttaatccaaatttcaggctgtagaaggtacaacttcgggattattagaattgtacacaatgtagtctggagtcattttcccttcctgtgttgtaaatgccaactgaaggctttcacagaatatgggattctgtaaaattacaaggcagattataaataacaagggctggtttctctatctaatgaaggcagatgtttttgattcccaatctacctttgtgtatgcatttccataatagcatgacatataatcttcttgtctctttgatataaatgctacatgagagttataccacatggctacatatggtgatggttttatagttagatataaaaaatgaatttcatatgtctatgaggagaccaatatattgtaggttgttaaaaagaatgagggcttacaaaaattgttatggttcaaataccatatcattttcttgttctacggatccaggccagtagtgagtggtatcaaattgtgaacgctatcaaataccaaaatatattttctcaagaaaaataaaaactgtaatgtgacaaacacctagggaaatactgtgttttgaagaaggaaacaaaatattcacaaacttttatttgtaggggatggagaggaaatattttgtctctgtaagtctcttgaaaatgggtattagaattttgtagttaattaattttgatgactatctgttaacagtcttctctcataaaactacaatactaaacatagaaatactagggtgtaaaaactgaaattctattactgaaaaactgtcttcaaatagtaacacagtttccagatgtattgcttaggttctgtttgcatttctattttaaaactccatttactatggtttcagtaaaaattcggtccaggctgaaacttggaataccaaataggagctctggagcaatggttgtctttaccaattttccagaagattgatttagattgttttatgttgtatgactgtgaaagaacaaaacagaaaaggatttgcttgtttgatattttattctgtctgtaatacaaatcttatttttttttcctggcaatttgtactattacaaatgacacatactgattttaatatatccaataagattgtatggagctaccaacaaataaaataacattttgataataagaataagagtcttcatcttgcctcttttgcaatatctaatggcatattttcatcacacagctcaagatacaaagtataacatctgacaagtgttaagtcttagacttctgatcctttttgtaagctttcttatagtttatttgacttagttttcctatctgatttattagggtacagatctaagtagtagaaaaattattctagtatgtaaaaaacaaagttgtcctcactgaagcttcaaatccttgtcctgattctgatccttgggggaagtagagatttcaactgaaaaaaacatggctagcagattgcatgagtcagtcctgttagtgaccagctttggagaaagcaataggagtaaagcagagtaagcaattagcacaggactaagtggacaatgtgcagagagcaagcctgttgcagaagtctgaaagtagcagtgtttgtgtgggtaaccttaaagaacaaagttagaaacagaggaagtagtctactctcaggcaacagacagcaaaataaaattcaatactggatcaaaggccttatgggtagagttcttaagtacatcttcccataggtagaacttggcttattgtactgacacatctcaacttcctataggaattaagtgggatacttgggtggaaagcacatgcactgaggctaaggaaaatgaaggctgacaccccgtggttgttgaaatcctgtcacatcagtgacatggatttaagttaggaaatgaaacttactggttggagattaaatacattttaaaaacttttaaatgtgtgcagtgtttgtcttggctaaagtcttatgagtgtaaatgttatacattgagaattacatagccaagggatacttgaagtgatttctatcatcctgatgtaggttttcctttagtacttgtctataaaatataatgaattataatgataaaaatcacacagtataaaatattcacttaatatgtggaattttctcaaacgttgttaatacagttatagaatattatatgctgaagattgataatccgcatattcaatttaatctaataaattactaatgggtattgatatgtaccatgacatgtgtgaggccttgaaaaaagtccaaaaaggtatatcataatcccagtttgggaaagtttcatgtccaatgggtgaactagaaaaaaatgtaagaaatgttgcattttaatgttctcttaaaagtgactcacaatggaatatgattttttgtcatgatttaagcattctaaaatgtgacatgaattattactcactagaaaccaatctaaagataccttttaaagtttccagcaaggagtatgtgatcacctttataaatataacacttaaggaaagaaaactatgaatgtaagtattcacaaattgctagcaggttcttgaataaatcatgctacataaattcaacagtgctattcttattaagttaatttggtctaaaactaactaatatacaacttacttaatatgctggtaccttttgttagaaatgggcataaaatgtgtctgaaatcctccaattagttgtcttaggcatttttattttattcagcatgaatccaaaatacacgtttgtatgattgttgaaccatttaaaaccaacggtgtattggaaaaatcattttatccagagttaagtactatttaatagagttttactcattggtcatatagtagagtgttatatgcagctaagatggaatcttccagaatttagagttttgaactgttaaattaccccaccggtgggtagcaggcaactaatggctgttagggcatgacctcaaagtggcctacttaacccattcgcttatttttaatagctctgtgatatgtgaataacacccttttcttcttttattacacatgctcatttcttttattctttattcattcctagtttaatgttttaaaatatttttaaataaaatgtttgagtttttagtttattattgaaaaggacattcaggtaatgatttatattctgtgtcctcaaaggggaacattttttaaaagattgaattcatttccactgacaatattacaattctttatttaggttcactgtatatttgggacctgctacatagaaaagttaaatgatatgaatggtctctgattaactacggccttttgtgttttgggaaaccgtaaggtaaaatgaaaatattttcaaagttcactcattcagtagttcagatcattttccagtgaactgtcacttacttaaaaaatttgtgtagcatgatgtttctagctcttttatactcaacagtgtctaaatggaacattttttttcttctgtttttttttttttttttttggtttttttgtggcttctttcccatgggggatcctgtggagagatattgaagaggacttcctagttcagctctttttcactctgttcttatcacatatagacagagtttagctctcagtttcaattcaatagctactcactgaatgcctactgtgtagatagctatagctcagggtgctgaaatagtgaaacaaggttcctgctcacaggaaacccactgagttatagtatattcctctttggactgttaaatgttttttccttattcttcatacttgaaatgctgttttaaagtgaactgtagatgacatcataagtgtttgtgaacttgaaaagattaacagtgtggatgtaggatttacttaaaatattcagttcatggaaaatcttgttaggcagctctattgcttagccaataaactattaagaaaatgtacacaataaataatccatgtagtaattttggcagtttcttggtccttaagaatgtgttgtccatttttaaatatatattcatatatttcagttctaaaattctaaaccacattctttatactttcactgtgatgtagcataggagttttacctcatagaggactgagacatatttaagtaacttgctcaagttaatatgattaaactataatgaagcttacataaaacttcatgtgttctgcttttcagagcctagtttttaattagtcaaggctggtaataatcatagaaacaactgaaagtattatatgatttgataagttgaattgattgaaatatttcagacatgaaaatatctagtttttcctcaggattccaaaccccaaataattttaaaatgtcattgtagatgtatttgaagtcacattacattctccatgatatcattcagttctcatcataatccaaagatggaaggaatcagaaattattatcaccagaaactgacttcatacaagtgtctggagccaagtcttttgatttcaaatcagtacctttagccttgttccatgaaaatggtttaaatatgaaagtcttatattcgtatgtagtgagcaattcagtttaactttggtgatgttatataggttccaaaatacagtctggctaaaatagagttaaattccttttgtctggattcactgagaattgtaagctctgtctgtgtcagtggaacctgtgttaggggaaatgaaattgagcacaggaggtgggtaacgtattctatccatacagtatcacagcaggaatttgagatttttccttttggtgacctcttaaaaaatgtgtgaacaaactacatgagtatgtataatatacatatatatttagtatatatgtacacatagtaacaaaattttaaaattatatataaatacatatatttatataagataaatatttatgtgaataaatcattgttttgaaaaggggttgatatagcatgagttcctattgtgagaataacaaatttgtgccctactactttcctctggcagctaaacaaggcatctatatcatggcatgtaggagatagagtatgaaatagacattttttttaaagtgtgctgtatccaaattcagtcacaagcacagacctgctttatttttcacattcaatataaatcaattctaaaaatatttgcaagtgtatatcttcctaagcaattagagttcacaaagaatgacagcaaaggggatacaatcatttaggtttttattatttgagtgtatgggagggtgattttttaaagatacttagaatcacaatgatttagaattttcccaaaggctatatattttataattatctgctcctctcacaaagcacatagggaaggtgcaggtaattttcaaatatatgacatttgggatcaccctcttgtgtagtaaatgtgtacactgaattttaagctttgatatcctaactgttctccctactccatcaaatgtgcattaaaattttttaatcaatttttttgtagatttatatgcagttgtaagaaataatagagagctcttgtgtacctttcacccaaggaacagctgtaaagctatgaaacaacatcacaacgaggaaattgacaccgatacagtttaatagtcttacttggctttcatcagttttacatgtatttatttttgtgtgcatatgtgtaagtgtgtgtgtgtttatatgtttagttctagacaatgttgttacatgtgtgggttcatgtatccatcactacaatcaagagacaaaacagttccagaaccacagggattccttcttcctcttagagccacacccatgtccctctactctccatcgcccctgccatccctagtccttggcaaccaaacgctgttctctacctctataattttgttatctcaaaacatcatataaatggattccgtctttatttatagagtttttgagtgtattctttgtgtgcgtttcttagtggttgctctgggtatcgcaattaacagatataattgacacagtctactagtagcaacattttactatttcaagtatggaaaccttacttccactaggtatctttgccctatccactttttttcttgtcttaagtattccttctatatatggtggacattatcaaagttatactttttgttttaataatcttatatttgaaaaaactcaggagaagggtagtccattgtattttctcttattttgttattttttcattctttcttcttgatgcgtcaagatttcctcttattactaattcttttatgtttgaaaaatattttttctttaagacagtcctgctagaggcaaattatctgtttctctttcttctaagaacatatttatttcctcttgattcctaaaggatagttttactggttaagaaatcatagttgatagttctttttcagaagttgaaaaatgcaccacttcctctggcctccatgacttgaaatgggaaatgcattgtcatttgaatttgtattctcttacaggtaataagctattctcttgggatcctttcaagaagtttgtttatatagttttcatctagttttcacagtagagttcactctcctatgagaaatgcccccactcatctgacaggaggtggagctcaggcagtgatgctagcttttcgaagtttcctcttgatgtatctcgatatagagttctttggggttttcctagtttgggggtttcactcagcttcttgattgattctctatcttcctgacttttgccaaatttggaatgttttcaaccattatttctttgaatacccttttagtcccactctctttcttctttccttctgggactctaatgatatcactgatggatattttgttattgtctcacaggtccctgggcctctgttctttgctatcttttctttttatccttctgttttctctcagctattcagattgggtgaattctatttctctgtctttaaattaactgattctatcctctgtcattttcattgtactatagagaaaatccaattagtttttatattggcttttgtatttttatttctgtaacgtccatttttaataacatttttcatgctaaggttttctgttttttttatttgtgtcaagatcattagtaattgcttattaaagtatttttataatggttgcttaaaaatttttgtcaaaaatttcaatatttgattcatctcagtataggcatcttttattttttctcattcggttatgattttcctggtgtttagtatgactagtaagttttttttattatacgctgaacattttgattatgttaagagactctggatgctaattagatttattctaagaagcagttgccctgttaaggtataacatgctagtcctagctttcaattatgggctgtggttctaatgagaatttaatttttagggactttgtgctgctatttggacaggttgatttgtctaattctactgggggccacactgatctcttctggtccaccgaagggagaagaggagattcctcaggctaagctgtagtggtctaggtgagctaaaaaatgctctagctcagcggtccccaacctttttggcaccaggaaccagttttgtggaagacaatttttccatggatggtgggcggtatgtgtgggggatggttttgggatgaaattgtttgatctcaaatcatccggcattagttagattctcataaggggcacgcaacctagatgcctcatatccagagttcacaatagggttcactctcctataagaagtgcccctgctgatctgacaggaggcagagctcaggcagtaatgttggctggctcatggctcacctcctgctgtgtgacccagttcctaacagactgcaaactggtactggcccatggcctagggattggggacccctgctctagctgacgaaaagaggattacttccagggctctgtacttttggtagagacatccccccgcccccaccccgcatataccctcccgcctcaccctccacacacactgctagagctgcttatctgctcagaacctctagatggagaggggaagtcttaggcatcctagaaaaagaggtcactttctctggctgtttgctgttagtaaggctcctacttcattctccttgcaggtaacccagtctctcctgatattgttggatggattctcatttgatcagcaataaaaatgagtctacctagactaccttctgtttctagtttgtggttgggagaagctgggtctggatcgtcttttactgtttgggaagctactgggattttcctcgggtgctggtgtctttaaccagtcctcctcactctttctaccttttagagtactcttttagttgctgcttgcttaattcccgattctacagctctacttagtagagcacacaatgataaactttttaatgcttttgtttttctcccaaaatgagtcaagtgaagcataattcagcaagatgctaaagtatcttctgtgaaactgagtgtcttgtgatagaaaaggtgattcaaaccaaagactgtattaacatacaatacagcagtggcaccaaccaatcagagcaaatttaaaagccagatagtttacaggtgcctttctgctcaatatcagctcaagttgaaatagttcaagtgcctctactgcagagagcttgtaataggccaatatttttgttgttgccttggaagtcctgcagcagtcacagtttaccaaatttatctgtccatagaagtgaacccattttgtttatagcttttcttggcactggtattctatgaaacatttgcagaggaaagctatgtttatcaacatcagtatctacctcatctgaagtattgcattagatgtaatcatttaataaaaaagttatttctgaaaacattaaggagcacctaattctactttgatttttaaaaatctgataaaatatttcaatatatttaaactttcttttaaactgttccaagaaataagatttgaatgtatggccaaagaaaacatttattgtattgtgttgaaaatatatagtctaaaaatactgactgtttctgatgtccttatttacattttcaatattttctctttccagctttaagggacaataggatcgagctggttcgcgcttcctggcatgaattgagtattagtgtcagtgatgtgtctctctctgatgaaggacagtacacctgttctttatttacaatgcctgtcaaaacttccaaggcatatctcaccgttctgggtaagtgcaagggactaacaccatgtaatcacaaaaccagaatgatatatattgctacagcaacataattcaatacaaaaatatattttgaagattatatgaatagatatggtttaatcctttctctgctacattttaacacaggcgttttaaaatcatttagtcactttcagcattttataaagggacaaagatagattcaaagatgtatatgacttctagaaggcacatagctattttgtttcttagccagcaatagacaccggttctcttgatttcagctaatttcttttttatcaaataatctatatgttgtatatattctgatccttttacgacatgacacaataatgagcataatgagttcaacttgtgttctatactatgctcctttatttgatcatgtaagtcacctgataagggcctttcttgctaacttgtggctctcaaatatgacctgcttgtgtatttagtgcatttaaatgaccctgatatttccatgtgtcttctctccttttgaaattatattttctagattcctaaatgaagtacctaatgtcgcttcagcttgcagcttgtagtttctttgtgcttttgttctctaaatattgggccattttcccaaaggtgaaagtgacacaaaaaaagcaatacattcatagagattccgaggaaataaagttgcagctctgagctctctgtgattccacagacgtcagtgccccaatcagctgaaattgctgcatttcattgaaacacacctgcgtgctgaacaagttagaagaatttaaagattgatttttttcccccaagcttgctgccctctttagatagaaaaaggcacaatgctgcatttaaaaggactaacacatgctgttctttttggtgggaatattaaagttaatccagctagtgaattggttttgtgcataggatataaaacatttctctgcaagtgacactgggactattttataaaaatcttcacaagtttgccattaaagacaaaatatgccctctaaaatggagtatttcaggataacaactgcataaggttaatgtattgttctgtagagagccaatttgaaatccaaagaatagatgactgatgaattcactttattaaatggtgatgaggcatagattttttaaaaagaaagcaggtagtatgtaggtgaagacaaaaaatgttaagaggagttatgttaatttttcatgtatctttgttgttcctgttgtttaatttgtacttctcatattggtgccttccaatattcttcttctttttttttttttttttaaaacggagtctcactctgtagcctggctggagtgcagtggcgccatctcagctcactgcaacctctgtctcccaagttcaagcgattctcctgcctcagccttctgagtagctgggattacaggcacctgccaccacgcctggctaattttttttttttttttgtatttttagtagagacggggtttcaccatgttggccaagatggtctcgatcacttgacctcggcctcccaaagtgttgggattacaagggatgagccaccgtacctggccataaaatacagagatgataatattctttttaagctttaagaactatgaaatcaggaaagaaagaagctaaagttaaattataatttgttaatggataaagaaatatgttttgtgagttttttttctttaatgcaatctaccttttaaaatttctacactagtaaattgtaaattatattaaatgattgtttttaagatttacaagagtattttcacaggtaaaattttacaaatgaggccaggcacggtggctcttgcctgtaatcccagcactttgggaggccgaggtaggtggatcacttgaggtcaggagtttgagaccagcccggccaacatgaggaaaccccatctctactaaaaaatacaaaattaggccaggcacggtggctcatgcctgtaatcccagcactttgggaggctgaagtgggcagatcacgaggtcaggagttcgagaccagcctggccaacatggagaaccacccccacctccccgtatctactaaacgtacaaaaattagccgggcttggtggcacccacctgtaatcccagctactcaggaggctgaggcaggagaattgcttgaacctgggaggtggaggttgcagtgaacagagattgcaccactgcactccagcctggggtcagagcaagactctatctcaaaaaaaaaaaaaaaaaaaaaattagtcgggcatggtggtgcacacctgtaatcccagctacttgggagtctgaagcaggagaatcacttgaacttgggaggcaaaggttgcagtgagccgagatcgagccagtccactccatcctgggcgacagagcaagatcctgtctcaaaaaaaaaaaaaaaaaaaattacaatttaatttaaaaaactactttgagctatatgcatcttacatacttttttgatactatatatatttatatatctgtacacatatatatgtgtatggatgtgtgtatatgtttatgtgtatgcatatagacatatacacctaagtatgtataacacacacatatgaagcagtttattacatagtagtttgttcatcttgatcgaacttcttgtcaattaaccatccagttcagtttcatgtgtgaaagtaatagacataataacaaatcaaccctgaagattgatgctcacttcatcattcgcttaaatttcaggtgttcctgaaaagcctcagattagtggattctcatcaccagttatggagggtgacttgatgcagctgacttgcaaaacatctggtagtaaacctgcagctgatataagatggttcaaaaatgacaaagagattaaaggtaaagaatagaaaaatgaaaatcaaaattaatgtgctgaaaccagtatgacatgttaagaaaaaggcattttacattatttttcaaaacatagtgtctcttacagattatgcatcatttgaaccagatttacccattcttaagtaaggtaattttacaagatatattaatatataagtatgatccctgtgggcctcattttcttcttccgtaaaataggtttaaaataatatatgccttatagaaaagttgagggaataattaagttaatatatgaagaaacatatagattcatacttcacaatagtacatattagatactattatttcagacctcatatataatattttggttaaagacagagaaactgtataaattatttcttcaacttagtttcgggaattatagagttctgagaataaaactggttaaacatcaataaatttgattcctgttaattctcacaaaaggcaaaaatgtgtacttgtctaagtaaaagtgcatactttaaattctttatacatctaaatttaaactccctctctctctgtcacacacacacactcaaacatacattctttaggaggggaataagtttataagggagatggcttggtatttaagtataagaattgtttatgatgattattaaaacatatttcttatgccactgtaatatgtattattttcaacattatcttctatgaaacaggtttatgcaaaccattctgcttattttaaaatgttatttatctatttatttttaagagtttttaagagatagggtcttgctctgtcacgcaggctggaatgcagtgatacgatcatagctcactgtacctcgcactcctaggctccagtgattttcccgcctcagcctcctgagtagttgggaatacaggcatgcacgaccatgcttggctaacttgttttattttttgtagagatcgtgctgtgttgcctaggctggtctcgaacttctgggctaaagtgaccctcctgcctcagcctcctaaagtgctaggattgcaggtgtgagccaccatgctcagacattctgattattttaacctataattgtgataccttatatcacactaattaattctttgtaatgggcatgcaggcttagcagataagattgcctatattactgaaaaattatgattataatccatgcaattatttttatcagtttcctgttttaattactctttctctgcatatttttcccaaaaaaggtccttatccataattttaccctgatcactacgcttgccttagtatttctaataaatatacattattggattacattttgagaaatacaagtcccaagacacaagttagacatcttattatgctaaattaaatttcaggttactgtgtaacctgattcttgaattctgtcaaggctcagtaacatccattctaattctgcctctaggatatgttagtctaggcatttctggacttggttagatctctctttaatggatgttccatagtgcttccagagttatcttactacaacaagaatctgatccaggcacttttctggcttaagcatttctaatggaaagccctaaactttagaataagtttaaaatctgctttctgtagcctgtaagaattctccaggcagtgaactcttacacgtcacatatttccttttgtgtgaaggtcttggcttacactaaaatgcacttcttagatacaatccttcaatgaattactttattacctacatgttttttcttcctaaattctgacacaattagttaattaattagttgtttactcagttctcactttcttagtattttatttatgttccaaggatttgcctcttttgtatcctcaaggaggtcatacactttcacatattaagtacctcattaatattgattgattgtttttcacattgtagctgcatgacaaacccatgatatactcagacatttataaaggaagtgaatttttgacaaaattggcctctgttttaaatgccaaacagatttaatcatacattgggcaggaggggaaagatttttgctcatatgaagaaatatgaaaagtttaatcttataaacaacatagtttaaaatcatctgaatcaagatcagaacaacaatgaagacagaaacaggtacagaatcagaatatggttctatgcagtactgaaaacttgtgaagatcccattttttctatgctcttcaatgcactgccatttacagagcatttatctctacacttgcatctatctatctgtctatctatgtatctatgtatctatctatctaatcttacaattctttagcatgtttacatcgtttgtctccctaaccagatggtgaactttctgagtggcatatattttatttttgtaagtgtatatgtaaatacagttaggtaaagactacggcacaaagtaaatattcactgtagttgctgtttctggatatgctaagcaaaatttcactcttccatcttttagcaaaccctcctcatttaaaggggtaatccaccttatctggcactattttgtctttttagggataaaagtttgacttcctattactatctaactgtttttagtataatatcacttgacacgttttaaaaagacactccctagcataaaataaggcaaacagaaaagacaggctaatcaaattcaattaaattcaattcaataagaaattgttaaaatgcctctcgatttcacagtattctatggtgcattagtgaagatgcaaatgagaaaccaagaaacttgacctgcagctgttgaagatgtctttggggttatcaaacatgttatggagaatattttcctaaaaatagaaacgtttatacaaatctttatcttttctctatcactacctaacatattaattttatatccatgtttctgggtaaaagtcacttgaaagtgctagtttatcacattttcttgtccagaatatgtccatacttggttatagaacagtggttctgaagctgtagccattaagcacagggcatcctcaagtacagggcttgctgaatctcagattatcaggccttgatccaagattttctggtggagcaggcccacgggggagcctgaaaatgtgcgtgtttgccattgtgttaaatgtgtgaatgatgttgacgctcctgtttcaggatcactttggtatgaaaaatataaaatgaagagtatcagtaaactatacagaagtcctgcctctgtctctgagctttctttttctcctttgctaaataaggacaataatggttgcctcaaagtgcttttgcaagaattctgtataaaatgatatgtatgaagtgttttcagagtacaaggaatcactgaatacattttagatattattatcattatcattgtaatttgtattttcaggaaatcatgatgagttgtaccaattcctgaattagtcctagaaatataaacaaataaaacaaaaatattccacccaagctttcacagttgagaaagagacataaaaacataagacataacaggcacaggtatatgaactggctacagttttgtgcagaagtagcagatatcagccctactttgtgggagaggttaaggctcaacagttcattgatggaagcaggcactcagtaaagatctgtttattgagtaaatgtgtcttaaacaatgtataaaccaaacagtgacagaagcaagtctcagtcgatctagaggtttattttgccaagattgaggacgtgcccaagaaaataacacaaatcacagaagcatctgtggtctgtgccttttccaaaaagggtttggaggacttcaatattgaaaggggaaagagcaagcaggaggggagtaagaaggaaaaaaaggggtttaggggaagggtagacaatgagacaagtggttacattcttgtgagagtttgattagctctcagttcatctgtattttacatgagaaagagagagtaggggaaaggtaaattatgcacttgtctctcactcagtcaatctacattttacataagataaccgtgtgaacagatgaagtggaggaaggagtcaattatgcactggtctcagataggcagagggattatttctagtctttctttgtctcatacctgtgaagaaaagctggtaatttgcattgtcatggttagattttacagaactatgttttagggctagtttatagggaaggcatgtattctgatagattatcggacccagaaggaatttccttgtcagtaattttggagagagaccatttggggagatacatggccttctattattataaggctgtgacataggtttgtgaaattgtagctatcagttcatgaaaaaaaagaaagacttttttttttctttttttcattactgagatcccaagcttaactttccctttggcgcagtgattttgggatcctgagattcctattttctttcacaaaggagtagaattcatcatatgtgtttgggacaaaagtaggtggtaggacactttgaagaaatgaatttcatatatctatgcagagtaacagcatgtgattgaaataactatgaaactttatgtgtggtataggcatgagaagtaaacagagaggcagggttcagttatgtcatgaaagagcttttattccagattaagggtttgaaatttattctataggcaatagtgagacttttttttaataagctttcaaaagtaaaatgaaacaatcataatttcatccaactctgttttttatcccctttatgagagttttactcagaaatccctttggtgcctctgggcagagctgcatccaaaaccacaggtagtttcactgcagcctttaatcttctgcatagcaagaaagtgaatatctgctacttagtgtgagaaaagatgtgcattgccttcctaagtctgtcagctccctaagagcttacatttacattaaagttgtcattccatgtataagtttagttctgtgcagtttgaggatttgctattacaaaaccatgagatcttttctacctaactagcttttacattaatgcattaggcagcattctatgataatccttaattatccacacccttgtataaacccttcccctagcatgtaggagataattgtgaatatgatgtgatatgattgcctcgaatatgatactttatattacaaaatgggttttgcagttatcactgtgggccccttttgagttcatcaaagggtgattatcaaggatgggcctcatacaatgagacgaggtctttaagaaggggtagagtcagagagacattattttcctggcctagaagaaaacaaatagctatgctgtgaattgtttacgggtgccatgtggcaaagaactgtgggtgacctctaggagctgaaagcagtcccaggtgatagctagtgagaacatggggacatcagacatatagtctcaaggaaattaatttactaacaatcagagagcttgaagaggaccctaactcagattgaaactatagccccagctaacatctttatttagccaagtgacactgagcagaggacaaggcttagccataccttgattcctcactcacagaaaccctgagataataaatatgtgttgttttaagccattaaacttacagtaatgtgttacacagcagtattaggaaactgagatctagagagacagaatattttttcatggtcacacatctggcaaagactagccttgaatattctgattctaagacccagcacttgggtttggggagaagtctgaagactagcttagtacttaagaggcattgcaagcaagagctggtaagtacctgaactaatggatgacaatggaattttttacaaagaaatggttctgaaagagaagataactttcaagtgaacttggtgaatgatctggacagatggagtaaaagcaagcattaagattataaaattcaggtgcctaaatgacttggataatgaatgtttgctcattaagaaaatgagaggcagtaggagaaattaattcacacacaaattataatatgttcatgatatggttggctatgtccccacccaaatctcatcttgaattctagctcccacaatccccgtatgtcatgggaaggacttggtgggaggtaattgaatcatgggggtgtgtttttcccatgctgttcccataatagtgaataagtctcatgagatctgatggctttataaaggcagttcccctgcacacgctctcttgcctgccaccatgtaagatgtgcctttgctcctccttcaccttcctccatgatagtgaggcctccccagccatgtggaattgtgagtccattaaccctctttttctttataaattactcatctcaggtatgtctttattagcagcatgagacagactaatacactaatgagacactgctgtaaagttacccaaaaatgtggaggcgactctgaaactgggtaacaggcagaaagatagggacagtttggaggtatcagaagaagacaggaaaatgtgggaaaatttagacttgcctacagacttggagggctcagaaagcaggaagatgtgggaaactttggcactccctagagacttcttgaatggctttgatcaaaatgctgatagtgatatggacaacaaagttcagcctcaggtggtctcagagggagatgagaaacttgttgggaagtggagtaaaggtcatccttgccatgcaaagagattggtggtattttgccactgccatagagatctttggaacaactgaacttcagagagataatttagagtatatggcagaagaaatttctgagtggtaaaacagtaaagagaaagcagagcataaaagtaggggaaatttgcagcctactgatgtagtagaaaagaaaaccccattttctggggaaacgattccttatttaataaatggtgctaggaaaactggctagccatatgtagaaagctgaaactggatcccttccctacaccttatacaaaaattaattcaagatggattaaggacttaaatgttagacctaaaaccataaaaaccctagaagaaaacctaggcagtaccattctggacataggcatgggcaagggcttcatgtctaaaacacgaaaagcaatggcaacaaaagccaaaattgacaaatgggatctaattaaactaaagagcttctgcacagcaaaagaaactaccatcagagtgaacaggcaacccacagaatggaagaaaatttctgcaatctactcacctgacaaagggctaatatccagaatctacaatgaactcaaacaaatttacaagaaaaaaacaaacaaccccatcaaaaagtgggtgaaggatatgaacagacacttctcaaaagaagatatttatgcagcaagaagacacatgaaaaaatgctcatcatcactggccatcagagaaatgcaaatcaaaaccacaatgagataccatctcacaccagttagaatggcgatcattaaaaagtcaggaaacaacaggtgctagagaggatgtggagaaataggaacacttttacactgttggtgggactgtaaacgaattcaaccgttgtggaagtcagtgtggcgattcctcagggatctagaactggaaataccatttgagcccgccatcccattactgggtatatacccaaaggattataaatcatgctgctataaagacacatgcacacgtatgtttattgcggcactattcacgatagcaaagacttggaaccaagccaaatgtccaacaatgatagactggattaagaaaatgtggcacatatacaccatagaatactatgcagccataaaaaatgatgagttcatgtcctttgtagggacatggatgaagctggaaaccatcattctcagcaaactattgcaatgacaaaaaaccaaacaccgcatgttctcactcatatgtgggaattgagcaatgagaacacttggacacaggaaggggaacatccacaccgggaactgttgtggggtaggggaagtggggagggatagcattaggagatatacctaatgttaaatgacgagttaatgggtgcagcacaccaacatggcacatgtatacatatgtaactaacctgcatgttgtgcacatgtaccctaaaacttaaagtataaaaaaaaaaccccattttctggggagaacttcaagtggactgcaaaaatgtgcataagtaattaggagccaaatgttaatcaccaagacaatgaggaaaatgtctccagggcatgtcagagaccttcagggcaacccctctcattacaggcccattgtcctagaagggaaatagggtttcctgagccaggtccagggacttcttctgtgtgcagcctctggacatgttgccttgcacccagctgcttcagctccagctgtggctaaaaggggccaacttacagctcaggatgctgcttcagagggtgcaagtcccaagccttagtggcttacatgcagtgttgagcttgtgggtacaaaaactcaagaattgagattctggaacctctgcctagatttcagaggatgtatggaaatgcctggatgtcaaagcagaagtttgctgcaggggcagggccctcatggagaacttctgctagggcaatgtggaaggataattggggtcataacccccacagagagtcccgactgaggcactgcctagtggagctgtgagaagagagccactgtccttcagacctgagaatggtagatccactgacagcttgaagcctgcacctggaatagctgcagacactcacgcctgctatgaatgcagctgggaggggggctgtaccctacatatccatctgggtgcagctgcctaaggccatggaagcccacttcttgcatcagtgtgacctggatgtgggagcccacctcttgcatcagtgcgacctgaatgtgagacatagagtcaaaggagatcatttcagagctttaagatttggctgtcctgccagattgtgacaatgcacagggcctgtagatccttcattttggccaatttctcccatttggaacaggtgtatttacccaataactatacccccattgtatctaagaagtaactaactacatttgattttacaggctcataggcagaagggactagccttgtctcagatgagactttaggctgtggacttttgagttaatgctgaaatgagttaagacttcaggggactgttgggaaggcatgattggttttgagatgtgggggcaatctgtgtccccatccaaatcttatcttgaattgtagctcccataattctcaggtgttatgggagggacccagtgggaggtaaatgaatcgtgggggaagtttttccatgctgttcttgtaatagtaaataagtctcatgagatctgatggttatataaagggcaattcccctgcacactctctcttgcctgctgccatggaagacatgcctttgctcctcctgtgctttctgccatgaggcctccccagcctttgctcctcttttgctttctgtgaggcctccccagccatatggaactgtgagtccattaaacctctttttctttataaattactcagccttgggggtgtctttattagtagtgtgagaatggactaatacagttcattctttaaaatgttgaggttaaggctgggcatggtggctcatgcctctaatcccagccctttgtggggctgaggcaggaggatcaattgaacccaagacttggacatcagcctggacaaaataatgagatcctctctctacaaaaaatttaaaaattagctgggtgtggtggcacattagtcttagctgcttgggaggctgaggttggaagatcatttgaatctggaagtttgagtttgcagagagccatgatagcaccactgcattctaacctgggtgacatagtaagacctcgtctcaaataaaagagaaaaaagtttgaggttgaagtaattatacagaatttaaaaggttatgcttatagtaggtttttgaagttaagtgacttataatgaggaaagagattttgaatatataaagatctgccattcggtaataagaaatgtataagttttagccttttaaaatagccatttctcatgatgtgtacagtatgcttcaaacaaaacttatctccacatgcgttccctgccctgagaattatgctgtgtacacctggttaggcaccaaagctggactctgtagtgggtcactgaagtttgccaggatctaatggtattgccatcattctataagcattatttacttattatataccgtgtgtttcaaaatgtttggccattaagctcgaattgacattagctatgtttccttgtgtgagtaggttcttgccatacattttaatgtcaatcaaagataatgcagcttctaattttcaagttggcaaaatatagcataattttactgtaagctgcttatatcggcagttggagaagagtgaatttctgaatgctgtgcttctcaaaaagtggcctttagaccacttagattagaatcacctcaggtggtagtttacaaaatgcagattcctggttttaaagtagacttactaagtcagaattcctggttgtcaggcctaaaaattccattatttctcatgtatctgtaatgttccttattattaatagagtttcagaacccgtgggattagagactaataagcaaagcattaataggtatttaggaaagaaaggaaggggcttcctaaagtagtaaatttagaaaatgactcttaacattctttctaccttatgagttctttcttagaggaggattctgtaatatggaatcaggatgtatgttagcattattaatgtttctgagaattacaacaataattgctttaacctacatctttttttttttttttttttttttttttttttttttttttgagacggagtctcgctctgtcgcccaggccggactgcggactgcagtggcgcaatctcggctcactgcaagctccgcttcccgggttcacgccattctcctgcctcagcctcccgagtagctgggactacaggcgcccgccaccgcgcccggctaattttttgtatttttagtagagacggggtttcaccttgttagccaggatggtctcgatctcctgacctcatgatccacccgcctcggcctcccaaagtgctgggattacaggcgtgagccaccgcgcccggcctaacctacatcttagtaatagtctctggccatataactcgatttttttatttctttatttcttgcttgcttgttttacttttttttggattaagctttgtggaaactacttgataaatggtagattatatttttatttattttatttggtgttgcaaaactggttttgtcctaaggactcatttaacatcagttgtataaaactttaatttgaatgagtaaaatattaacatgtaaaccagacattgcaaattctttgaaattaaacataaaagaagaggaagagatttgtgtcccctgagtttaaagtccctgcatcatgtataagaatgaatttaaaatatcattatttaaacttatagtatatgccatagatctgttatttttatgttcctttatttatacttactgctttgaaagtggccttgccatttcatccagaacatgctgggcactatattaagtgagaaaaaaaaattaatagcatttaaatgtgggtatgtatatctgtgtgtgcgtgcacataacttgaagttttcttaatggtgttaaacgcagtacctcaagactcaggcaatactaggagatacataagtcactctatagaaggagatataatgattgttccaggtgtatatgagtggttgagttgaaagaataatcaccagaaatcattgagagtctttactttttcatatttattttaaaaataaatttattaagatataattgacaaaaatcaatatatagatatttaaattttgcaatttattaagttttgacaaatgtctgtagtagtgaaaccatcaccacaagcaagataaaaaatgtatttattatccccaaaagtttatttatatcctttccaacaccttccctttgccttctctgcccactctctacctcagtcccaggaaaccattgttctgctttatggtacaatagattagtttgcattttctgcaattttacataaaaagaatcatagggtctgtacatatctttctttttttttttttgagtctcaacataagtatttgagactcattcatgttgttgcatgtacatagtttcttctctgttttcttgctgaataatattctattgtatggatacatacgccacaattagttacctgtttacccagtgatggacattcaggttgtttatagtttgcagatattatagtaaagctactatgaacatttgtgggtacaattttgtatggccatttgtcttcatttttcttaggcaaatgcctagatgcagactagctggattatatggtagccatatatttaattttttaaaggccttgccattttccaaaatgtttgtactacttcataaaatccaattcatttattgtgtatatatatatatatatattttttttttttttttttttttttttttgagacggagtctcactctgtctcccaggttggagtgcagcggtgcaatcttggctcactgcaacctctgcctcctgggttggagcaattctcctgtctcagcctcctgagtagctgggattacaggcgtgcaccaacatgtctggctaatttttgtaatattagtagagacagggtttcgtcattttgaccaggctggtcttgaactcctgacctcaggtgatccacccaccttggcctcccagagtgctgggattacaggtgtgagccaccgcactcagcaatattactattatattttagttttatgaatcatgctttagttttgtatgtgagaaatttttatctaacgcaagatcacaaaaattatacatatacattttgccatttaggcttaggttttgaatctattttgagttaatttttgtatttttaatgcctttgttattactaccaggtgaattattttcgggtcagtttccattgattgatttatttcctcattgtagacagcattttcgtgcttctttgaatgaattatggtttttttattaggttccagatgctgtatatttatctttttattgttgtatattttcatattgctataaatattcttaagctttattctagtcaagttatttagaggttagtcctttcagaggtttttaaaaatttattaagtgagaccagaacagtatttgactaggaattatgtttttcctgtttattgatgtaaaatttttctgtgtatccagtgccctcaattgtaaggattttggttctggctgatggtaataggcaccatttacggtcctgtttgaacatcatatgcaatttcctctaatcctttcaaatagatcttgtcccagcctcagtttccttacacagatgcactgattagttcttaagcgaatactggggggagcactatggatgtctggagtccactctttgtccatctctcttcttctcggtactctgctctgcaaactgattttgccttccaggctcccagcttcatcaccttaactcaaagaggccaccaaattcttttgcatgggttctcctccatgcaacgcatcgtgtaaaatctctcaagatattaagcagggactattttagggttcatctcacttattttccatctctaagagatcatttttcattatgatgttcaattgttttaaaaattattgttttcaggtgaaaacaacaatttgtctctgttacttcatctagactagaaggagtagtctttgtcattttgttttgaattgtagagaaatatacttttatttcaatggtagtgtgtctcaacctttttgcttgtttaaggtttatgagaaatttaaaagatgaaaatgaatgagagggaaacacatccatacctattttgacaggctattttaaattaaaaatcatgcgagttttgaggttagacattattttgcttagttacaggaatttagtcttgttatgaattcttatacattgttggaatggaaaagaaaatttcggtatgtatatcatgagatacataaaaacattttttttaaatttttactggcttttacttagtgtcaaggaattgaccaaagaaattgcttctttttaaacttgtgattaattaatgttgttaatcaacgtatttaatttaagggttaaagcaagtgcataccttaatcttctagcactcataagcccatgagtaatcctgacattataataacaaaaatattcaaatttgctagttccatagctctcatccggtgatggagggacttaattactgctcaaattttcttcaggttatttccaaaaaatattttatggcttcttcatatgtgaggaaaatacctttttcattctttaactttgaatttttcatggaaattcacttcatgatccttgtggcacataggagaaggtagcttttcccattacctttggctaatgaccttctttgaatgcataagatattttacaaaatttatgaatcatattttactaaaattaactcgctaattaattgattaccctgtgtctatgaaaaatacaaaaattagctgggcgtggtggtgcacacctgtaatcccagctactggggaggctaaagcagaattgcttaaacttgggaggcagaggttgcagtgcaccaagatggtgccattgcactgcagcctgggtgacaagggcaaaactccatctcaaaaaaagaaaacaaagcaaaaacaaacaaacataaaaagacattagatccaaacaatttttcacaatatgatcaaattgatgtcttagtgtagcagtatctaaatgagttggtaaattaccttccatttgtgttggtaatgggaagttgattgagatagattattttacctacattatgttatagtatagattacagttggatcatgaagttcaagtgcattcattgtctgctattttatttactagtttggaaataaaatactctgtttgctgaaagtagtcattatataaaaagtcttccaaggtaatcttccaagagaataaccaatcttacctttccgtcacatttttctcttcaatcagtaactctaaatttaaagtgttatttgtatacctcccaaattgaagccaaacctggggttagctatttttatttattttcacatagaaacattatttagatataattcacatcatcaaattcatgtatacaatttaatagtttttagtaaattcacagaactatgaaactctcaccacaatcaatttcaaatttttatgattctacaagaagcctgttagtgataactcccgactttcccccaactgtctccaccctaactctaagcaaccacaaatctactttctgtctgtataaatttgcctactgtggacatttcatctacaaaaatatatattatgtgttttttgtgattagcttagcataagctaatatcatctgtgttgtagcatatatcagtactttattctttataattgccaaataatatatcattgtatgcatattccatatgttatttagtcattcattagttgatatgcatttgggtttttatgctttggggcttttattttaaaactctgctataaaaatttaggtgccaggttttgtgtagaaatatgctttcaattctcttgagtatattcctgagaacagtattgctggactaaatggtttctgcttcacgtaccttaagtgctctctttacatagatgtatacatacttataattgttatatctttctaatggatggtcttttctatcattttgaaatgttctccattattttaatatattttattttaaaatctgctttgatattagtatagtcactctagctttctattgcttgctgtttgtatcatatattatttttcatccttttattttcagtccatttgtatctttaaatctaaagtgtgtctcctgtagaaagcatatatttttatcatttaaaaaaatacagttttataatctcggctttttgattgaatttttaatcaactcacctgtaatcttataattgatattggttaatttccatgtatgatattacaataattgatataggtttattttcatccatgattttacatttatcttctatgtttcatgtcatttttgttttatgttcattctttaccactttatgctatatgaagtaaatattttctagtttaacatttaaattcctgtaaaaatttttcactttatttttaaattatattgttagtagatgctctcaggcatatcatatatattaacttatcagaatctaaatcagattcataatagcctaatttagaagatatagaaatgctactacaatatagctgtttgctctttctcccatttttgtagtattgttgttaaacatattacattttaagatgttaaaaacacaacaatacatgattacaattattacttcatatagtgttatgtctttaataaagctgagaaaagcaaggataccaagtacctaaaatttgttacataaaacatattatatgtttttaattctcctaatttcttcctgcaaattcaagttaccacctagaatcatttccttattctacgaaaaacttactttttatccacttcctttgtgctgttattgtcaaatatattgcattttcttgttatagaccctgtaatacaatgataaataattgttttacatcattaattttgtttccctgaataatctttgttctgattattattttttaatcacttaagagaagaaaaaagaagaaacatgccattttaacctctttttaattatacaattacctttactggtgcttttttttttccttttctatctgagatcacttgttttagcccaactttccttaacatttcttgtaaggcaggactgctttaataacctctcttagattttgtttacctgaaaaatattttatttcaccttcatttttgaaaaataattttactggatatcaggttcttatctgacattttttccttcttttagcacttgggatatgctacccaactaccttctgaccttcattggttttgatgaaaagtcaattgtcaagggagttcctttgtaaaagtacccgttgttgttggcttattgtttattgatttggatgaggtatttctattgcagtgtgatgtcattcctcaggaaacgcaggctttggcacgtgcacagccaccgtgggaatgataatggcttcagcagggctctcactgaatgtctttctttcctgttgtctctgttaagctctctgcttacgttagtatcacacccagtgattccccttcactatttgtcagctggttgccctactgttttcaataatgctatgtgcataagttgttctatagcttgatccatttacatctagaatcctttgctgggctttattgttttgttttgttttttcttgaggccagtctttgagattttctttaacctgtgacgacaggaaggccgttgctagttgtctttttctctggttttcttttataaactatggtttagcgtgcttatctcatctaaacacaagggctttcttacttgctttcttccaaagtctccactttgaacttcccccaactctgttccaaatagttcgttcccttagagagcttcagaaaaacacttccctgttatagctggcttcttccctgggcaaaatggtggtagcttccggtcttcttgctttgtctcttctggattgaaatctcccctctataagtgagctaaagtgagagctattggggtccctttattcttggcatatgagcagggactgggtgaaagaagagagtcccaacctttcagccacaccacctggaattttgactttgcaaccaagagtaataatgactgaaataagaaatgctggcagcctgcctcttctggaaaggaccgtagtccttcgttgaggaaacatggatctccaccttgggtacatctatccagttttcctaatgctgagttggggatgaggttgaattagggagaaagtcatggttcaaataccatagactctatctgttcttactaagatttgctagttttttaaaataattatttgttcatttgctatagacccttggcacaattttcagagaccttaaatatgtatgtgtgttttagaatagttttcactagttatggttgtttagctggagagaaagtctgcagagctacttatttagcatgatgttcaggagttgcccccaatttctttttcatactcatacgttttcacgatattgactcgtaaattattctaatttatcttcttaaaaatatattccttgctttatgtttatgtatccttttgtctctcacttcctgctaatttttcatagataaaatctgcacttttctattttatattcaaaaaatgtctttattttttgcctctataggagatgaaactattttataattttctttttccttgtaagtatagataatgtttagtaatgttattccccctttttttgtaaaatttatatggaaaaatgtttatgaattgaaaagatttaacagctaggtatatttttaacttggtaatttttcatttagtttttttctctttagtgatattgccaatctcctttcttcccccttttgtctatggtgaatgcctgaactcccaactctaggaagttctgataaatgggactctaatctagttgatctgcagtgagaattacaatggctgtggaaaatagcaaagatagaattgaaaaacaaagggtaaatatagatctgcgtaaaagaaaaaagttagtctgtctaattccaaatattttgtcatatccctctagattttgtattcttccaatacagaaactgatgggaggatttaaaaagagataaactacaaagaaaatcaattaaagactgacaactgtccccgaattatatatattgacatggaacgaatctacttactagaaggaaaagaagctttacctggctgattgcaacctttattttaattaattaaaaacatacttgttaagcatctatgatgtttcagatactgtcctagatgctgtacccagcgtctaaaacctatagagaaatataaaaattaggaatttctgcagacgaaagaaagaaaagagagcagaagggagagaaagaatgaacagaaaaagaaaaataattagtaaaaaaggaaataacaaagttaaaaatttaatctaatctttattttatgaatacataatttatattgaaccttgtgaatgtcccaatgggtaattttaatttttaaatgatgtgattctcagaatacaaggtaacctgttgaaaaattattgtaaaaactctggtagtacatggtacatagaaatattgtaatatattcagaaacttatcatttcatcacaatgttttactgatgcaagtgattcatttattcattttcactataggtagatgaggagcaggttgctttttctgacatgtgctgagtgctgcaggactccatgaaacaaatagtttgattaccagaaaattgcatcatcataaatgtttcaaagaagtcacacttgcctgctgctacagaagttgctcaaatgcgtagatatttttatttccttaaagtttattctactgaatagacttaaaataattttctgccatatgttattatattttgggcatgcaataaaacatcattttaaatatatttgaggagaaaggacattctaatgtagacaaatatagagcccaccctgaggcttcgagtcaggtaatatatgtacctggttcttgtagcacctctcaatgtagatctgcgaaataacatttaagatacattttatgaaaagcattgacattttacttgtctgggtaaactgaaaaagagactttaatatttagataaatgaagtatctcctcttaataatcttccataaacattatttttctcatctgaccttttcagatctattaagaagagctgaatttcagtactattccttgctaagtgggatagttatccatgttaccaatgaatggtggggtcatacctgtagagtcagttaagaaacaggattatgactggtacttccttcaaaaagttgaatattataaggacttttaaaaatctaccctatttcagacaggaattgtatgaaagggtgctcataggcaagaatgagatttgcctcaagaatttgtttgaattctttttcagtgcacaaatgaatgtggttaccagactttaaagttatacaatgtaaaatatagccactatgtttggtctagagacagtttaaaacaaatacaaaatgaaaagctttgcttgaacattaaagaaaagtgttttgtaaaatatctttgagcatttaaccttaagacacacacaaaaaagtattgacatttcctctaagacaaattgcctttaaagtatgcatccaagttactgaatgaattagccagacatagttactttaggtcagttaagaaagaaataatggggaagttggctgtgttctaaaaatggtgtatttagttttaggaattttgatttacagaactgtgaagcagtaattacaacatgtccagttctccactgagttcgttcactcctaatttttgacaataaagccaactctcatgtaatgcgtatattttctgttctctatgagatgaggtcatgaatctagctcactggttatggcacaaaatcattaaaggaccactgacaacaattatgtggattcagactaaattccttgatttctccccctgaaactatcatgttatccatcaaaaaccacttttacaaaccttacctctgaaaatactagtaaagttcaagttccatataagcatcactgtttgggacacactaagaccatgctgttttgctcatggtcagagaattcaaggcccatataggaaatgtcacttaatagcctacatgattcctaagagataccttcaagtgatgagaaaatatggaagtttcagtttctaaatcctgccttgttcccagtgtggtctattgaacttggaatggattaaaaagaactggcctactctaggcagatggctgataaagaggtctatttcaggatccagggaaagtatttcattataaaagtgaaggtattggctggacacggtggctcacacctataatcctagcactttgggaggccgtggcaggcagatcacctgaggtcaggagttcgagaccagcctgaccaaagtggcgaaactccgtctctacaaaaaatgcaaaaattagctgagtgttttggcatacacctgtaatcccagctactcaggaggctgaggcaggagaatcacttgaacctgagatgcagaggttgcagtgagccaagattgcgccactgtactccagcctgggtgacagaatgagactctgtctcaaaaaaaaaaaaaaagaagatatcttcttttccagtctgtctaaatagcaccaaaaccgcaaaagtggagaaagcaaataaaccaaaatagttgagattatactgctcaaggcatataagcaccactgtggagacaaggcaacttctctaggaacttcacttaagaggattttctttttccaaaacttcattctaaaagtggccagaaactagatatagagcctgatgagttaatattataaacctaggaaagatggatatgaaagtatctccggaaatatgatattttgtgaaaaaaaattggatgcaagaaaatcaagatatcttggcttttttttttcttcttttttttttttttttttttccagttaacctaacttgaagcatttaaacttacttattttgggtgctccagtgctcgaacttaaatttgctatttcttttttcaccttagttcttgctaagacaaaagatctaatctcctgaatataaggagattgctattctacaatccagattttataaagataaataatataaaaactaatagaaagtcctttatcttgagactttaccaagaaatatttaggcagctaatttttgtttagaattatacttgaggaatttttctttaggtatatttaaaaattttattatagaaaatttctgacatatgcaaagtaagcacaataatagaatgagaaactgcatgccatcacccaattttaaatgtatcgacattcagccatctttgtttcatctatccctctaattactctccactcaattgtaattattataataacttacggttatgattttttttttttttgagatggaatctcactctgtcacccaggctggagtgcaggggcgtggtctctgctcactgcaacctccacttcccgggttcaagcgattcttctgcctcagcctcctgagtagctgggactacaggcacccgccaccaggcccagctaattttttgtatttttagtagagatggggtttcagcatgttagccaggatggtctcgatatcctgacctcgtgatcctcccacctcggcctcccaaagtgctgggattacaggcgtgagccaccacgcccggcctacagttgtgatttttgagggaaaatttacatacattgaaataagctaatcttaactgtaaaatttttacacaaattgcaaagcagatgacctcacaccgcttttgatgtagagcatttccttaactccagaaaacccgaatatattctctcccagtcagtttcccacatgactcaccaccaaaagtgaccacgttttgactatttaaatgtccagaaggtctactagagagagtaggaggagtggttatgtggattatgaaagaaagaaattctgaaatttcctttgtttcttgtttgttctcaaggttttctagtcatttcattaacacattatgtaatatataggacgtgcatattttgaaaaatgtaaaatgaaatatatatatatatatataatgtccaatggaagtttttgaaaagaaacaattaaaaaataacaagagagagaaaaagagaaaaagatgggaagagtaagtcccactattcccactccatctttagttatgtctccagtgtcaaatgtttgcactgtactcttgctcctcaaaatatggtctgtgggctagcagcagactctcagactccacactctaacctactgaatgcgaatctgcattttaacaagatcatatgtgcattgcattttgagaaggctattcttgatcaccatgtaatataactgacatgcaaaggaaaggaaagtggacagaacatgaaagaaggatacacgtggtatcagcaaataaactatacaatgtaaagaaaatttctgttggctctataactgtgtaatgcatcgttattttaaaaatacagaaagggaaagcagagatacattttaagtgtcttctctattcatttctttggggaagaaggtcagcctaaaatatgagaaaagatattatgattggctcttctcaatgttttttctgttcatcttaaggcttctggtaaccctataatctatcacataagccgatattaaaatcaacaaattacacttttgtttattttacttgaattagttcattaaaattttatgatttatacaattgctatcaaatgttatgtgtccaattaatattacattaaatgctacttttgtaagggaaacagctaaaagaagcagatgtgtgagttcttaaagtgcagctgttataaaaagtaaacaaccagcagtaatactttggagtaatttctcatatgttgtgtagcacaattataaaaattgtttgtcaagagatcaatattttcttactctgacactgcttagagctaggaacaagtaaacgttgggcatagagttataaaaaaagaaaataaatgtaaaaatgaagcaacatatttgtataaatctatgagactgaaaagtgaaagaaccttataatattttaaatataagcaaagaatcataaatgcatctgaattattgtgacatattttttctgaaaggtcatagagtctttaatatttttaaatggaattgtacctaattttcaagtgcaaaaatcttagtaaatgactttagtaaaaatgagatgagatatttcataggacacgtttataaacaattctgcgtataattttgtatcctgtgttatttactttcagttaaaagatggaattgagacttcatggttctgttcttctttctaaatgttagagattttcttactcttcagaattgcctaacatacataaaacattttgtggtaaaaatcttaattaggtcattttcccctaatatgtgaaactataaacatattttcaagaacaagacatatcacatctatcatttaatctcttactaatgtttattttatttctatctttaaaatcaatcaatatgataaagtcatacttctgaaataagtgaaagttagtgaacatgcatatgtctattaatcaaatgttacatcaaatccaatactattttaaaagcccaatctttgcgtaaggcacaaagatagaaaaactgaatgtattcatttttgttattaatacattttaaaatgtttttaaaataaattacttaatataagttaaaatcaaattatgtattttatgtgaaaggtcttatttactgacaatatcaatgtttatttgatactgaatgatgtaaaaaaatgacagaaagcaagaaaactgaatacacttttccatcaactacatttaagatcttgttataatgataacttaaccttatcttattagtttgatttctaaacctttaaaattgccctcttcttatcagctacttcagacttgagaaattacaaattaagcaaaaatattgctaaacctcttttccacaaagaacaaatagtcccttagtgcaccatttaacgatggatctaaatcatgcacagcaagtttaaatatcgataaatgaattcacatcttgtagaaagtactcttgttcatgctgaaataaattcctcagccaagtgaagagcattcatctcaatgtaaatttcactgcaaatatatacttaagtattcaaaatattcagatggctgtgctccttttctttccaaagatgacaactttctcatcctaagtatcctttagcaatttatgttcacctcacattgttcatgttaaagttgtatttcaaatgcattgtgctttcttttaggcatagccatatagttgtaaatttgcccttcctaactgtgcttgtggctcagaaaattaagattatgttttagtaaaacttatagctaagagaaaagacagactacttttgtaagatgatatgcattgttttaatggagtatataagaatatcttgtgcctgattataagctaggtaagcctgagaccaaagaaataaaattgctgcgcccccacccttttataatatttctggatctagctcttagaattttttaattttttttattatttatttatttattaatttttttttttagacagagtcttgctctgtcactcaggctggagtgcagtggcgccatctctgctcactctgcaagctctgcctcctgggttcacgccattctcctgcctcagcctcccgagtagctgggactacaggtgcccgtcaccacatccggctaattttttttgtacttttagtagagacggggtttcaccgtgttagccaggatggtctcgatctcctgacctcgtgaagaatttattttttaagtaattgtaattttatttaattgaattgaaatagattaaatgttaaaatcacaaatatttgcttcttaaaaattgataaaaatagggagaagctgtttccattatcttgagtaaatgcaatctgttttattttgaaaggtgtcacattttaaaattcatattttattttcagatgtaaaatatttaaaagaagaggatgcaaatcgcaagacattcactgtcagcagcacactggacttccgagtggaccggagtgatgatggagtggcggtcatctgcagagtagatcacgaatccctcaatgccacccctcaggtagccatgcaggtgctagaaatacactgtaagtaaacactacttccccctcctttatctcagcagcaaatctcttcatctgcatctaaaatcatttcaaaactacctgaagttatagcaaaggtgcagtaaaatccacggcaaaatgaagtaaaactacattcactagtattaatcaggttcaaaggaaaacactccttgtctgagtttcattcttaacaatgaggaaaaatgaaggagatgtacgaggttaatactcctatgtttcaaattgtggcttaacgtaggcgtgcacgtaagggtgggggagaaaaagtagtaatttgagcaaaatcactgagaatcggtaatctgagagggccttgatgaacagtgttatattaaaataactttattttatgcaattgtggcttctcagctatgcttttaagattagactagttttaccttctctatggcatatactaatgtataaatataggagcttatttattatgttttcatcatcatcattattcacaatcaataagaacaaaattaattttgtgaatctaatagatcggggcagtgctaaatgttttgctggaattatgtcattgagtactcatttacgaatagtagcctgatgagtagttactctcattagtcacaagatacacacaaggattctgaagattatggaggctgagtcacacaactagcaaatgacagacttgtaattatggcagttttagtacctagcaaggttttagtagacaattatatatactaatcaaaatgaaaatgaatgaattgaaacatgtgaaataaaatataaaagaatagaggataggagataatatgttctgaattgcaatatttgattttctagataatgaagattttgttttctctatttgtgataaaattatagcttgagcttagaaattgtgtgtgatatgcaattacattaaatcctaaaatactaaactctaagtactgttccaatatgtttcattgcattttgttttcatttatttattcaacaataattttttagtggcactatgtaataggcattgttttgggcactggggttacagcaatgaccaaacaaaaacacaaaacaaattgagtttgtctccaagtgtcaaaataatcacctccgctatcaccaacaaacttcatttctcttacagcatccattctaggtagggatgaaaaaaataaataaatggaacatatcacatgttacatattgataagtactaagtacctgttgataagtacatggctgcaaggaaaataaagcataggagggcagtaaggagactgaaatggagattaaggaaagtgagtatgtgtgttggtgtaatgcagagggaagggcaagtacaaagaccctgaggtagcttgtttgttgtttttatttctaggaatagcaagggtgccagtgagactggagtagagtagactaggagaaaaatacagagtgttgtgagaaaagattggagaattgccaggtgaactagaattttttgattactttttatatggaaaatataaagctgactataatatgcttatttttaaattattcttagtttagtagttattgaaaacattataatgtttaaatgattacaattatgttaggttaattttagtaatttactgctattctccttgaagcaaattcagaaagaagcatacttcagagcccaaatggagattatctctcaattttgacatttatttgtattttggctttgggaaaattactgaaactcgttgagctttgattataaagtagaggagtcattcctgtgaggatgtgatgataggctagagaattaattccttgaacttaagtcaagttcatggcatttaatagactgaataaatgtcaattgtcttcctttttctgtttctttttcttacatcagtgggtctctcaaaatataaaaaattgtgtaacaatatttttaaaggaccaggatcaacagcattttaatttaaactctttaatatttacatacaaagcaaagtaaaactaaatttaaaataataattgactacttagttaacggtaattctaacatataattaaataaaacaataaaaatcagtcataagaactattgaagaccacttccagtcacagatcacccaaaatctaccaatagtcaagcaaaaccacatttatgtaagttgctctggcaaaggagaaaacatagcagatgaatctctggatgtaggtaagaaagagtgagaagagacttgttacaggatttgggcttgtgccggctattctaaagaggcttctggattgtgtgttctcaggattaggagcatgtcagtgatgggtgtatgagtaactttagctaaaaaatgaaaatattgtaggtttgctattataaagacacagtagttaattttgctaattttgtggacattgagggtcctgatctctgtcttgtttcacacctggtcataagatgaacttgtctttgtgttattccacgccacagtcacagactacctttatttgattactctacacattctggaaaattgtttgttgagaatattttagcctatatgtcagctgccaaggtcattttcactactttggaaatcaaaaatggaagtattatacaattcttgagcattttagccattaaccatatttcaatatgcatgaataagtaaaacttcatggaggaaggcaattgaattatctaatttttaaagaaagttttacattaaaaatgttacacttttcatggctagccaattaaaaatagcatctcattctatcatggtttaatatgtaaatggctagaaggcagaaaccagatctatttaaattattttcctagcatctagcataccatcattcaagtatgtgaagttaattaaaactaactgatgataatgctaaatgtttctttaagcgtgcagaacattctccggagattaaatgagtagaggatggaaaggagacattgagcaacagtcagcatcaatattagagcaaattggtgtgattttcataaacatcttagaataatgataatagcatctcaatagttgttcccagagacagtagatcatggctgcacttagatccacatgtgcaatctagattatatagaactttccatgaatgagaaggaggaaagaagagctcagccttggaaacgaagaagatgggttaatctgggatttatggagcataattttagtatttctccattgtttgacaatattcttgtgatgaataacctaaaagactggcccaaatggaagaacatttagcatttcagatccacagagatgatattgttttcagtggtaagtcaaaagagtaaatatatattcctacaataatggaaacagctatgactacatctaaaataaaaatcctctgatattgtagaaacctaagtttggtgagcaataagaaattaaagataaacatacaatgccaagaggcataatgaaaaaagtatagtaggaggacttatatttctagggcttaactgtgttaagtctgtaaccttgtgatatacaatttatatgaatctagcctgtaaaatatatcagagcaatgtttttaaaaataaaatattaatcatacatttaaatactgccactatgatgaaagagagttctctttttttattattatactttaagttttagggtacatgtgcacaacgtgcaggttagttacatatgtatacatgtgccatgttggtgtgctgcacccattaactggtcatttagcgttaggtatatctcctaatactatcccttccccctccccccaccccacaacatgccccagtgtgtgatgttccccttcctgtgtccatgtgttctcattgttaaattgccacctatgagtgagaacatgcagtgtttggttttttgtccttgagatagtttgctgagaatgatggtttccagcttcatccatgtccctacaaaggacatgaactcatcattttttatggctgcatagtattccatggtgtatatgtgccacattttcttaatccagtctatcattgttggacatttgggttggttccaagtctttgctattgtaaatagtgcctcaataaacatacgtgtgcatgtgtctttatagcagcatgatttataatcctttgggtatatacccagtaatgggatggctgggtcaaatggtatttctagttctagatccctgaggaatcaccacactgacttccacaatggttgaactagtttacagtcccaccaacagtgtaaaagtgtttctatttctccatatcctctccagcacctgttgtttcctgactttttaatgatcgccattctaactggtgtgaggtggtatctcactgtggttttgatttgcatttctctgatggccagtgatgatgagcattttttcatgtgttttttggctgcataaatgtcttcttttgagaagtgtctgttcatatccttcgcccactttttgatggggtttttttttattgtaaatttgtttgagttaattatagattatggatattagccatttgtcagatgagtaggctgcaaaaattttcttccattctgtaggttgcctgttcactctgatggtagtttcttttgctgtgcagaagctctttagtttaattagatcccatttgtcaattttgtcttttgttgccattgcttttggtgttttagtcatgaagtccttgcccatgcctgtgtcctgaatggtattgcctaggttttcttctagggtttttatgattttaggtctaacatttaagtctttaatccatcttgaattaatttttgtataaggtgtaaggaatggatccagtttcagctttctacatatggctagccagttttcccggcaccatttattaaatagggaatcccttccccatttcttctttttgtcaggtttgtcaaagatcagatagttgtagatatgcagcattatttctgagggctctgttctgttccattggcctatatctctgttttggtaccagtaccatgctgttttggttactgtagccttgtagtatagtttgaagtcaggtagcgtgatgcctccagctttgttcttttggcttaggattgatttggcaatgcaggttattttttggttccatatgaactttaaagtagctttttccaattctgtgaagaaagtcattggtagcttgatggggatggcattgaatctataaattaccttgggcagtatggccattttcacgatattgattcttcctgtttatgagcacggagtgttcttccatttgtttgtgtcctcttttatttagttgagcactggtttgtagttctccttgaagaggtccttcacatcccttgtaagttggattcctaggtattttattctctttgaagcaattgtgaattggagttcactcatggtttggctctctgtctgttattggtgtataagaatgcttgtgatttttgcacattgattttgtgtcctgagactttgctgaagtttcttatcagcttgggcttagacgatggggttttctagatatacaatcatgtcatctgcaaacagggacaatttgacttcctcttttcctaattgaatgccctttattcacttctccttcctgattggcctggccagaacttccaacactatgttgaataggggtggtgagagaaggcatccctgtcttgtgccagttttcaaagggaatgcttccagtttttgtccattcagtatgatattggctgtgggtttgtcatagatagctcttattattttgagatatgtcctatcaacacctaatttattgtgagtttttaacatgaaaggttgttgaattttgtcaaaggccttttcagcatctattgagataatcatgtggtttttgtctttggttctgtttatatgctggattacatttattgattttcgtatgttggaccagccttgcatctcagggatgaagcccacttgatcatggtggataagctttttgatgtgttgctggattcggtttgccagcattttattgaggatttttgcatcagtgttcatcaaggatattggtctaaaattctctttttttgttgtgtctctgccaggcagaaagagagttcttttaaaactgaaatttaagaaaatcaaaagcagaactttcacaatgaatcacaaatacctgcagattttacataacagggaagaggaaacttcacaactgagcagtgggaaaaaccacttttaaaaattaatcaatgaaaactcaaatttgtcctcccatttttgcacagatttctttgtaaaataactttttatttgtgagttaatttttagaagaacatattgtatgagtcagatattatttaaatctcagtataaataatgtatctgcactcacagtgcacaaaacacagaaaagaagaaaatgactgaatattcattttctgtatgtatcattgacaaaaattacattaaaaataaacttaatgaaaatgaaaagtgcaagagacagaaaactaaaatatgtcagactattgtgtgtttttcctgaaaaagcattttaatactgtaactaagaactgaaaatatgaaaaatgagagttcaaattttaaaaaatgtgtgtaaagtatattttctatataattcatctcatcatgaaatcttatgcttatcattaatgtttgtttagtacttcttttaacagtactaggctttgcctataaaaatgagtagctatttacacatgaaagttattactgtttaaagcaataaatagttaaaatagcttgtagaggagaccctgcatgtacacccaaaaaattctgagtatcaaggaaaggaaggaatgaatggctgaaggaaaggaggaaggatgagaggaaaataagctgaagtgttaaaattgtgtttacatgaaattaattaggttaataacgaatgaaaataagaaatatatcatatatatttaaaataacagaaaaacgtttgggtccaattgttactaaaattatatctttttaaggggttaaatggtcaattgacagtcctgaccttcttgatgattatatctctattctagttaccatgcgaattactaataaagtcaatccatttttctcttaacaacttacatttttaaaatgtatcaaactatttctgaagagattccttccttgccttactccgttttaaagataattactttgtgcccagagaaactaaattcttccctgtacttttttgttacttttctggaccaactaatatgcttgatcagttctctgtttagttgcaaaacaatgaaattgatttaaaataaaattctgattatagaagacaatattcaatatagatgggtttaaagtttggtaattcagttgttcgtatcttctttttattctcagatgtgggcagagattctttatttcatgtattcttggctgttgtcctttttcacttgtaaaaagtaataaagttcttatctatgcagtctacactacacaaacccgtacgtttctctagcccaggtcagtttattttaaattgccctatgttagttatattctctttgctttcactacctttctacatattatatattaagtgtttcaggatatatcagcttatcagataggaagacgaatattccaaggagcattcaaaataaaatatctcactcatctggcatctcatttatgaaatgctaattatctaattatcttgtctaccacaaattatatatagcataagggcacagaatataaaaggaaataggaaaggtgaaatgaaaattatatttgggttacatttttttagaactaaactgttcttttgacaaacaaaatgccatatttatgcctgggaatgccttagaagaattttaatttagcctaagatatttcaaaaagctactgaaatggtatatatgctagaatcataaggtgatctatgctgtttagtaagagatgcatttcattatgtcaataaagatagcctagagtgtgaccactatttgagattctaaaaaatttttaatttttttcagagaagttacatttatgtatattaccagcagtatatattaatggcacattttgctcatgagacaaatattgttttcttttataaaatataagaatatttatgttaaatattaaaagtaattgaatcatcaggtattttaagccatctacaggcaaggattcaaaatgttgttattgtgccatctttatattattaatagtacgtaacaatttgtgtgtgtgttattaaaactcattgaagaggatatatatatttgtgaatgggaattccaaattaaaagataataaatgtatatataaaattaatataacatactctcaaatttcctaattaagcttatcatcaagtacgcatttataaaactttttggaagttttaaaattattttgaaaacacaccttaatttcataaagaggcagtaaaacataacatcaaaattatggaatgtatgtatagtacagatgttagtgaatgttttcaattatttttaagtcagtctaatagagaataaaaactggataaaaatgagacataaatgaccgtgacaagtaaaaatatcatatacatcttgttaatacctaatatttttaactttcaatttaataacttattctactttatgtctatttttaaaagatagctacaggtatttttgtattaaaaatgagtagatatttaatgcccaatattttgaaatttttgtatttctactttctgaataaactataaacacacacacatacacacacacacagacatacacacaatttccatgagaaaaacgtatagttagaaaatgactgtaataaatcaatgtattagactttactggattggctcttgatatattaggaaagattgttattgctatttaccatcaggtccaatagtctggtgtttttttaaataatatactttatttttaagagcagttttgggtttactgattagctgagcagaaagtacagagggttcccatatacaccctctcctcactccccttatagtttcccctattattaatatcttgcgttattgtgttatctttgtcacaactgaagaactaatattgatagattattgttaagtaaagtacatcctttacattagggttcactctgcattgtgtagttctatgggttttgacatgtgtataatgtcatgtatctactgttatctctctctctctctctctcgttacatcatccaatttaattctacagcccaaaaaatctcctgtgctccacctctttatctcactttacttctcccacaagacctggtaaccagtgatcctattattgactatagttttgtgttttctagaatgtcatataatgggaattttgcaggatgtaatctcttcggactggcatctttcacttagcaatatgaatctcctttttcaccagtaccttactgttttgagtactgtagtttgatactgtgtcttgaagttgggtagtgtcagtcctcagatgattctgctgctgctgcagattcatcatcatcttcttcttcctcttccttctcctccttcttcttctcctccttcttttgcttcttttctttcttattctttctcctttcttcctctttccccttctttctctttccttctccttcttccccttctttcctttcttctccttctatattgtaattatgttatgttggtcaatttgtaattataaattgttgtaatttttatcacatttataattaaaatgtgattaatcagtatattaaactttattaatcctcaatgtatcaggaaacaaaatagtcatatctactatctgggccacactttttttgttttatactctaagtcttttttttaatgacgtattaatgtaataataaaaggagagtgaacaacaaattttattagaactttcaatacaaaatttaaacagaaaaaccggactttttattatctatttctctggctttaatggtatatatacacaaattgcgcaataattggcatgcatgatcctgaaatatacccatcttgtaaataatgagtcaagcttcaaaatgcatctctactgtgtcctatcttgtcattgctttttggttcttctttcactagcattgttagaatgcaatactttagaaacactttgatggctcatagttttacccagaagaatacaatatctttattccataattgcaaaacattttcatttttagatttataaagagcaattaaaataaaactaaaatatatattttttgttgtttttttttttgagatggagtctcgctctgtcacccaggctggagtgcagtggcactatcttggctcactgcaacctccgcctcccgggttcaagcgattctcctgcctcagcctcctgagtagctgggactataggcgcccgccaccacacccagctaattttttgtatttttttagtagagacagggtttcaccatgttagcgaggatggtcttgatctcctgacctcatgacccacctgcctcggcctcccaaagtgctgggattacaagcgtgagccaccgcgcccggccgaaactaaaatatattcttaaaatttcctcatcaccaaatgctttcaacatgtttccatttatggactgtgtaaagtaaattcttatgttcaaaaatcataaaaggtaaaagaacattgtcatattttcctttcagcaaaatcatatggttgcaaaatattgtgtggtgaagtccttctttgtattagaaactgttccaactcatctatttttgagcttgatagaatttatctagagtatcaaaagtgaaaacttgttttactgtcattttaagaggcttgagcttcactgttttctctttgcatttctcctccaatttttctaataattttggggtgtctttattaatttccttcttttgccattataggcagaaaattaaaaattctgagttctcaattgatatcatgaaagcaaaaaaaaaaaacaacaaaacaaacaaacacagtagcaaacagaactacaatatggtgtttttgtttctatacttcttttaattttttacaaaagaaaatccaaaacctgggcaatcctataagcacataaggattaggtaacagtgatgatttatatcacttgcataaaccttctaccccagcattgtccaatataactttctgtgataatagagatgttctctatctccagatggtagccaataatcagctccctgtggttatcggcaattgaagtgtgggtattgtgactaaggaaatgctatttaaattttacttaatcataattgaattacatttaaatttaaatagccacatgtgattagttgttactgtgtggacattcccactcttaaatcatttgtatatatatccattttattcttatgttattctttttatcatagttggggataattgatgagttagtggtgaagtaataactaggtccctgaagtagcaagatttctcataataaaagaaacatagtgtcaccaaaatttcataatgtatcttagatttataagatgatttaatgtttccatatcataattgcaaggtaagccaatttttaaacctatttttaaaattaaattgtttctttttttttggagcacctctaataaagaaagaacacaaattatgaaatatcattacttaaacatagttagaactgtttcaaatgcacttaaaataatgtaccatagagtcaacagttataaaaatgtatggactggcacagtggttcacgcttgtaatcatagcactttgggaggccaaggcagatggatcacttgagctcaggagtttgaaaccagcctggccaacatggaggaaaccacgtctctacaaaaaatacaaaataattagccatgagtggtggcgtgttcctgtagcccagctacatcgggggccaaagtggaaggatcccttaagcccaggagtttgaggctgcagtgagccgagatggcaccactgcactccagcctgggtgacaaaatgaaacaacatctaaaaataaataaataaataaataaataaataaataagaattaaaatgaacgaaagtgctgatgcatttattatctgtatttttactgctaccttttgcttccctttaaggtcttccttgtggcccaactttatgatagagacacattgcttctatgcctctcctagatacactcagttttacacactgccaaacatgtcttcttaaatattggttctttacctgatacaaacccgcgaagatttcttattgcttctaacataaagtccaaactctacagcttgacattcaaggcttttaaaatacaaccaaccccctataatgctgctctcaagtactctttttcagacaatgcattctatgctttacattatttctagatgcctcatatatagccaacattctttaatacaacactttgttaatttttcctttgccttaaatcccttcttttctttccctctagaaaatttctaccagatcaaatgctgtgttttctctgaattattttaaatgtcacttttctaagtaatcttctttgcttctgacaaatatgtataatctatcctggcaactcccatactacatcatccaagtactatggtgtctacaatattgagtttgaattattttgaactatatataatttatctaatttattaatactatattccgatgggttgctatttttgcagatgtataacagttttataatagtggtactgtgtcttgtatgcacagtgatttataaatatttttcaaataaataatgattgccacagaagcattcactaaaatcgaaagaaatttaacacaccgttgaagaaaagtaccggataattttcagtattaagaaatgtaagttaaatggaaagtgagaattttactacagaattacaaacgggaaaaataaactaaacatcttagaaaaacacaattgtacccaggaaaaaacgagaatcagatagtgctggaactgaaagagtcctgttaacccttggtattttaaccccactgttcctattgagtggtagaacttgaggtgtggattgagtttgatttacagcttttcatttcaggagtgtatcataatggcctaactcagagtattaagcgttcacttcctttcaggagtaagcaatgatgtgagagaacataagcaattcgtatcaatgcatacagcgccacagttctctagtagctccctatcttttgtaacaaagaagacagagatagatagatagatagacaaatataaagaaaataggccgggcacagtggctcacgcctgtaatcccagcactttgggaggccaaggagggcagatcatgaggtcaggagatcgagaccatcctggctaacacggtgaaaccccgtctctattaaaaatataaaaaaatgaccgggcgtggtggaagacgcctgtagtcccagctactcgggaggctgaggcaggagaatggcatgaacccgggaggaggagcttgcagtgagccgagatcataccactgcactccagccggacgacagagtgaggctctgtctcaaaaataaataaataaataaataaataaataaataaataaatagaaaatagataataaagtaaatgtaaatattttaaagaaaagtattattgacattttgggcaagagaattctgtttgtttttttgggggctggtgtggggctgtcctatgtgctgtgggatgtttagcagcactcctggcctctgctcattagatgttaattgctattctccgttcctctaacaagcaaaaatatcttcagacattttcaaatatacttaggggatgaaattgtactcagatgagaaccactattttgaagtaaaacaaaagtggcttcacaatagtgagttagtgcattgtcttctttagtattaatgttaagttctgagagatctttatatgagtgttacctaaatttagtttggaaactcttatgcaataatattgcgataaggcaaagattcacaagtctttcatctgcaagacactttaaaatttctaaatttccgttagtacaaatttgctatcgggaggttttttttttatattatttgtggatgagaagagtttgtgaataagaagaacctgtttttataaatgagacagtgggtgtattttaaaagaatattttttgactgtcaatgaggaaaacgatgtgagagagatatatgagagtgtacacaatatgcagatcatatagagccaaagccttgggctggctgctaatttaaccagatagagaaagagttaattctgatgaatttaacagaacatagtatgaaaaacatcaattgctagtgtagtctaaaagagactagaaaacacaaactcattgaaatgtgattaagattggagaaaaagggtcaaataaatttatcagtgttaacttcactcctttgagcatgtttcgtattctgtacaatgaggagagcacagaatttttggtatgctttataagagtttgatgagccaatgcatacagagcaattacatcaatgcgtattatttaccaagtatttgattaatgtttactattattagaagatagttgtgacgagtaaatttgattttctaacaaatttaatcagtagttggaaaatatttcaaaagaccattattcatttatttactcaacaattacttaattgaggtccagtagttattctaggacatgaggataagtcagtgtacaagataaaagatgatctctgctttgataagcatgcatcctaggaatatgccaaacactgagtagcaccgtttaagactaatacctgatcttgagggaccgcaatatgaatgtcacaatgtaaaatgttataatgttacaatgttaccattctagtgaaacaatggatagaaatgggtactagcactcttctttgtgtgtcttaggaactatgtaagtgtttgtcaaatgaataaatgacagtactcataggaactaattttgtgaacaaataaaattatcaatattataattttctttcaaccaaagactgtaatataagcaatgcaaatgactgctactttgtgttacaaaccactgtatttcttcactcactacattatgcaatataggagggtacagtagtctttggttgtttctcttacttagcattttggccatcatccataacaggttaagtgttgattttatataaccttaaatttctattatacttattcaattacaaaagaaatacgttgttttttattttatttttttcctgataaaacatttaactcaaagcttctttttatttatctacaaaatctggtgatggataaattttgttaagccaatgacgctaaatactttcaaagcttgtgcttttaagattgttcataaggtggtttaatagaagcttcatcacaggtcttttctcttttaaaatccttgctaaggatatagaaaatccattctgctggatcaatatctttactttgattcaaatcctcagtcattcaaatggaaagtgagctatccttacttcccaagttcataaaacctttaaatttttgtataaaagaagaatttttttttttttttttttgaaatggagtcttgctctgttgccaggctggagtgcaatggcacgatctcggctcactgtaacctccgcctcccgggttcaagtgattctcctgcctcagcctctcgagtagctgggattacaggcgcatgccatcatgcccagctaatttttgtatttttagtagagacggcgtttcaccatgttgggcagaatagtcttgatctcctgacctcatgatccgtccacctcggcctccgaaagtgctgggattacaggcgtgagccaccacgcccagtcaaaagaagaaaaaccttttgtccataaatctagcttttgaaagtaattgtgtttcttcctaaataagccccagaatatgtcagacaaaggtaaagcaataaaaaaaaaatctaggaaaacaatggggctttccacatttaaacattttatagacattctaaagaatattttttgtttctacaaaagtcttagagcattttgcttttaaaatatctgcgtattttagttggatacttacaagtactgaaaaattatttgttaatgattgaatatatgcctatctttacacacttgtacaaaacttcagtttttttgcattttgaacaaaacattcatttatttacacaacacttaaagagctcttacaatttactaagcatgagatataaggacacacaatcgagtaagttaatatattagattttgagtgctcaaaatgtggatatattacaaatatacattatgtacattcatgtatatttaataaatacaacgttgaaaggaccaattttttaaaggcattttaaaactgcgtgaaaattgctagtttgcaaaaaatatctgagtttcacatacaggacaaaactagaataaatagcagtcgtattaatgcattttttctaacccccttttaaactattactaattggtacaatacaatacattatatcagtaaattaaaaacagaacatcatacacatctccaatgtattgaaccaaaagagtcattctgtcttgtgaaatagtagagcaggaataaatgtaacacaccttgctcctacagaggaaaatagaggaattatttctacagtaagtctggaattactgtttaagtaaaatttggtttagaaaatattcccaatttcaatcatttgaaatatgtttaaaatgaacaactatgaaccagaagaaaatctataattaacttataaaacatattcacagaaaaaatacaaacttttttttctaaatctagtagataacttggcaaaagcatgtaaggaaaagtttggatgatgcactatttacttcattactattcatatctgggtcagtaaaaagtggagtaacatattaagtgcataaatttaagattattttagaaaaccgtttacatgtaatctattatgcattgtgccagtcctgacaatccattcattttgatatgtaacaaaataaataatagagagaaatatgtttacatcagagtctcacacattaatataaatagtttgaagacatcctggaaagtgaagactttcaaaattaactcagtttttgagatgactacttttctgttctttggttagctaacaaagtatagtagttctaaacgcatttacaagcattatttctagaatattattgatatcttactaaaatgtttttaggataacattgcttaatcaattctcttatgtatgataaagtgtctgatgaaaataaatagaaataataatgacatagatctttatcaaaaccaaaattacttcctgctattaaaaacaattattcgagagtcaagtttaagataataacctcattactgtagtacttgtggttaataaaaaggcatttagtgagtattactaaaatggcatgtttaaagaggaataatttatatcatggaaatataaactagctttggctgaataattaaataaatgtcttcacaattgagtactacctctgccaaaatcagatgagtaaaaaatagtttacacatgtagtacttgcattaaaaagaaattggtatttttaacaacatagaaaattgttacctaatgatatccaatgcagattatttgtaacagagagtgtgcaatatacatttaaaaaatttttctttttttaaaactttctatgggtacataattggtgtatatatttatggggtacatgagatgttttgatacaggcatgcaaaacgaaataagcacatcatgaagaatgggttatctatcccctcaagcatttattctttgagttacaaacagtccaattaccttctgtaacttattttaaaatatatagttaaattactattgactatagtcacttccttgtgctatcaaatagtaggtcttgttcattctttctaatttttttctcgtactccttaaccattcctacctccctctcaaacccccagtacccttctgagcctttggtaaccatccttctactctctatgattacgagttgaattgatttgatttttatatctcacaaataaatgagaacatgtgatgtttgtgtttctgtgcctcgcttatttcacaaaacaaaatgatctccagttccatccatgttgttaaaaatgactggatctcattctttttatggttgaatagtactccacattaaattaaatatgaactaagattaaaagttaatctaaggtttgcaacttaaatatttaagattaattatatgttaattaattaatatattaataattatattacttaataattaaatgttaattaattaatagttcagattaattataatgttaatcttgttaatgtaccttctaaacatcaggcaccaataaatttcatttaagcatttaaaaatattttagaatagtataccaaaatgatgataagatatatcacaaattttattgctggccatgcatggtagctcacacctgtaatcccagcacttttggaggccaaggtgggaggatcacgtgaggccaggagttcgagaccagcctgggcaacacagtgagactccatctcttcaaaaatggaagaaagaaagaagaaagaaagtaagaaagagataaagagagaaaaagaaagagagagcaagagaaagaaaattagccaggcatggtggagcacacctgtggtcccagctacttactagactgaggctgcaggatcgatcatgtgagcccaggaggccgaggctgcagtgagctgtgatcacacccctgcaatccagcctcggggacagagtgagaccttgtctgaaaaaaaagaaaataaaaagaatattacttccacttatttaacaattatttattaagcacacactttgtttaaacactatgcaagacatggaggatatatcaactacttttaaaaagaacattacacaaaggtgaaaaaaggaacatgcagcaatggtatctgatcagatttgaaggtaatgaatgattgcccttagcaaaagcatttgaattaagattttaaaaatacgtaagaattaaataagcaaggaatctctccaaaatggagcatttctgataatttgtatgaaggcaaaatgaaacacatttattaaagaacttgataaaaataaaattggctggaattcaaataataaaatagaacattagaagacaagaacataaatgatacaggttatgcaggacttaaatttaaaatcattaaattttaaaatttaaaattattttaaatttttattttaaatttattaattattaaaattattaaatggtttaataatttttaagagaaaagattaattatgaaaggttttaagtagtaagttgatgtgatcagatttatgttttgagaagacaattttgtttcgttatcagagtaagatttaaagggttaaaattttgacataaaggagaccatttactattttggcaaactagattaaaatagtggctgtggaactatgaaaaagtagtgaattaatttgaaaattatttagaagataaattaacaagagttcatgggtaattgattatggaaaaaaacaaagaaacgaggtatcgggtgtatgtcactgcgtggatgctagtggtatctatagaaatagagctctctgaaggagaaacgttggggaaagattggagactgagttcattttgaatacgtcaaatgtgccaagccttttagatatccaagtgaacatgccacataggtgttgcacataaataagcttgtgaagcagaactgcactaggatataaatccatgagtgattggtaagtaaatggaaactaaagataagagtgaggcttaaaagacctagagaaattcatcaaagaacagaatttgaatcccattcaccctgatcttaaacatgtaaaggctacatagaaaaataccacccaacagaatctgagaaaatgtagccagggacctaagagttgaaccaggagtatatgtgtggcagggagggggttgaggaacagatgaaacataggtatttgtcaaggaaatctagggaagataattatttaaatctccattttaaaattatctttacataaattctgtttttgtgtgtgtgtgtttccttatttatatggaaagataggtcttagaaacaggagctaatcaacactttgaataattttgaagtcaaataaatgaatactgtcttacatctcttgatttttagtaacttagagcttatttaggttattcctgagagttgtatggaaatatgtgttaagtatattatctgctttggcgtttgcttataatggaaattctgtgtgtcagatctaaagggaatgctgaatcatacttcaagggaacatttgttacacagattctcgcctctcctgtactgcttaaactaaacaggcagagcaaagccacattgtgcgttcctcttttctcacagctgcctgccactatgtaatttaccttagtgaagcagatcctggtggtgaccttccatttccctttggcacatactatttttgtgtactgacaagggcaaaagtgcctaggaaataacacctcctcaccaacctcctccacccccaccctcaggagcagtcctcaaccaaagaggataactaataaataaatattccatcaatagtcctgtgtcttgcccatcaagtaaggtaactcagagtcatgtcctccactcactctcggttccacagtggaattgaattcaatttgctttgctcatagtgtaatctgctcaataacacaggcttcatttacttccttcccttcctgtctcacttctcaaggcttcctgagattaccacctggcacattccccgctcaataaaagacagcctcagggtctctttgttaggatattggacaccatgttagggttctccggagacatggagccaataggctgtacatacatataaaaggagatttattgtgaggaattgtccatgtgattatggaggtgaaatcccaagatatgcaaagtgagtcagcgagctggaagaccaagagtaccaatggtttagttccactctgagtctaatggcctgagaacgaagagaattgatgatatagttccagtccaaaggtctcaggatccagacccagaaagacccaaggtttccattctattctaaaggcaggaaaaaagtcaacattgcagttcaaacgacatcaggcaggaagatttattttctacttggaggaggagcagccttttaattttatttagtctttcaagagattggatgaggccctttcatatcatggaatgccatctgctctactcagtctaccaactttaatgttaatctcctccaaaaaacatcctcgcattaacactcagaataatgtttggtcaaatagctggactccccaaggcacagtcaaactgacacacaaaattaaacatcacagacacccatgttaacataattctgtctcccaaaattatacatttctgatctttcacctcaaactttttccatgaaaactaaactcttctttataatatgtcatggggaaaataaatgttgctatatgtatgtttagttagaggtcaaaagaccataggcctcagtttgaccagaacagtctggttcacaactgtcatcttcataattattaatattttctctttttcttttaaaaatgtcctgctctggagatgaaattatatggttatcctagtcaataactgattccatagatgtgctgataatggaaaaaattaataaagtatgtttaaatctgatattcaatttttttcttctatcagttaaaaaagtatgatgaatgtgtatcatattttttcagattaatttttcttcctaagtcattttacaccacaagtatttactgtgatgtattttgaatgtttatttgcaaccagaatgttatttttaattgtcttcaatgcattctcttgtttaaggaattaaaggagaatgcatttgaaaagcatacataattttaaagtatgatataaactattacattttattttatactttattattctatataggagaaatctaaataatattttccttagataaggtaactcacctgaaaattacacaatcggtagtaactcatttaactggctctaaaatcaaagaatgtatataataacagtgcagatcagtccttctgttacagctaagaagggaagagtgagaataattgtgatcttctggagagttcagagcctattttgtttattgtagagaatgtgaagataagaggagaagacaatttcacattgactgtgggccagacaatgccaggactagcaaagcctcataaagaaagaatgtgttaatatcgtctcttttttgagcttattttccattttttctatgaaatatgttacctttgtgttgattaaggaatattgtatgtcattcaagttatacatataaatgtcttgaagtattctttaattctcactagggatgatttattgttaaatggaaataaataattttctaacaaacatgcagtagcacatataacaaatgttaacttttaataaaatcataaatgctattggaagtgactcactaactgtacttctgtacttcagagcaagcggcatgtgcccagtgctgcatcattgcattttgaaaagattctgcataatacttgtgagacagtaattgagcttgagttcattgtgggttccttattgtgagtccctggtattcctgtaacaatgaaagtgttgttattcagatgcacataaatgcattcagcccataataatagtattcatagccatctataaatagtttaagaaacaattgtatgaaatgcttgatattcatctcaaccacattttgcaatttctcttttaaattcagatttcagaaataatacaacagtggtgctcaggagatatttagatatttttgttagctttgcatggacaggttgttagctttttaaatcacacaccttattttaccaaatctaagaaatcctttataaatatacacaattataaataatatataagaaatgctgaacacacagcatgatgcacagttattaaatatctagttttgtatgtgtttaattacctttcttaatattcttttatttctagatacaccatcagttaagattataccatcgactccttttccacaagaaggacagcctttaattttgacttgtgaatccaaaggaaaaccactgtaagtgagttaatgagcaataaagcttttaactttttttcttttatcttgctttgattacagcctttaactgtagaaatccacagtttgtgtcttttcttggtgggcaaagtgatctctagaacagaaaacctcatgaaccatgtcttcattaaggtctatggaagattggtttttactttgtcatctagtgaagtttctgggaagatttccagctgttatttctttttgtattttttccagtaagatattttaacctgaatggagtatatcagtcactgttcatatcatcagagtataaaagcagcacaccgttgaattcagttctcccatgaaaaacttagaaaatattgaagcatccccaaaatacgcccaagttttaaagttacaagaagactcattttcataaaaggaaaatcgaatctatatttcttatgaaacacccaatgaaacaagtaatgggtcacaaactcaatgtgtttaattgtaaagtaatttcaatattagaatatatgcacgtcaatgtgataatgtcacttcaactctaaaacttcaccttttgaaatttgtgtttataaatagctagtcaaggaataccaattattaagcaaaacttacatatggatatttaattatggattatttaaattctatttgaaagcaatatgatcattctaatacaggaacactctaggcctagctttatgtaatttacttgatttgttaaaagattccaatttattttaattctgtttaaattttaatagaaggaattaaattgttctttgtatataactatatgagattgcttctggcaaatcaggttaaattgctaaaaatttgtctccaataacatttatattatttaagtttcatactatcccatggagaatgtttctaaaagaattgtaagatagatgcctggcactttaacttcataaattgtatgtcattatattttttaccatattaataaatccatgccttatttaccacagttttgatatttttaaactgttctctcttctagtaattattttaaagagattgtttttggtcttctttccttcagatttatccaaaagtacatttgtatacatttggattatgtgcacaatttatgcaattaaacaaggtgaagttagggaatatgctttatagaatgcttgaaaataaatgaatgcctgctcaagtagcatccaattgtcttacaacgattctttgattccatatctacttccaacagtagaaacattattttacttatggaaattattagactttatgttttatataattaaatatttaagtagttcatataactcatctaagatatggttgaatgaatgtgccttcttttaatctcttttcagttacctagaaataatcttggatgtgtaataatcctctgcactgcagatgaatgaaaagcacaataatttcttatttattttatttaagaatacaaatttcaagagatttatgaaatgcaaaatattacctttctcagaaggatcctgattactatcattttgcaaatagataaaggaaataagaaaggctccctattttacggaagagaaactaaggctcaaaacttttcactaaattttcctatttatccagatttaaaatgagtgagaatttgaattcagttcagtcttgcccaaagccttaactctttctattatgtgctgctacttcaattgctaaatgtaaatttccacttattctagctaaagttacttttgaaaaactagaataggactgacaataattttcatcactgaagttgaagccctagatgctttagggcagtgaactggctagtctcatgatatgtttcactgttgccatcctcctttattaggctttcttctatatttatattatttctggaaacttgtcaaatttctaccaaactagtcgtttctggcatgagttcttaaccatataaaaatctgtaatttaatgtagtgtgttctggcaaataactcatgagctccacaacgtcttcaaagtaaagtagtcattatatgttgcgtttatcttcataaatcccagtgttatattctgtatgctatggtccacaagtaaatatgtattaactgatttcttgtattatattctcattcacaactttccctttatcatatttccttgcagactgtcaggacattagcattaaagttagaatcaacttctttgatgcctttcttcatttggactattgcttcttcttcgttcttctaatcatcttaaataaacttctctatatttttacagtaactgtcttctccattagatgaaggcattaatctctttaaaaacagtctaatttttagcctttctgtagtttatatactatttccaacagtgccagatgaggcagaaaggacaaaaaacaagacaagactgaaataattggattttcccagaaggaaatcttactgatcgtaaagaaaagtcttaccagagtaaaaagaacaggatgcaaattgaaacggtttaatcagggagttagtaggtagtagggaagtgaagacagccactaaaggaaagactatcaacttcaaaaaatgaatcaaaaagtggaagagggatgagaaaaaattctgtcaaacatattttaaaataaaacataataatagcaacacatataatggggagtcttgcatattttaagatagccatacaagagtgggagtgaaaatgaaatatgtgatatactcaatcagcaggttagaattccctgttttactcaggtaatcgttgtcaaagttctactccattattttgcaactattgtacctgtatcttcattttgttatttaagaaccactgagaagcaatactatagcttagtattaagtaagcttagtatataagcttacttagtatacttaatgtactaagtatagcttagtataagtaagcacttaatttttatcatctttatcatttatctgatccacttctcattaacatgtgaaaatcaggaatgaatagtggctatatgatttctttatatcttgtagctgtcttcaataatacatttaatctgtggtcaaaacttcattgtttcttaaaaagtatttaactagtacgttttgaagaatgagttattcagagtaattaggtatattggtagtaggcaaaatcacaccactatcttttgtgtaaatcacaacatcatggcatggctcaagttgcactgagcctggtgttccgaacctgcccttctttatgctaatgttgttttccttgttctaaatgtgagggccccagtgactgtttatgaacaatcatgcctatttgcctgctttggactgaagccttttgccattttcctgtgaaacagctgcataacttgggccaggaccaaattgttccacttgacactactatagaagcattctattctttccttaaaagagagattactgtacatgtctgtccattgttttaattttagtttaaagtgaggaccgagctaatgccagccacttttctttcaagtccccagagtttttgcaaccctcttctttctttggctgaattcccagacagctttcaggcagcagcattctccattttaaaagtaaacgaaaacacacacacacacacacacacacacacacacacaacatgaaacctttatattacattaaagtcatgaccttaaatggtgtgaggttgcccccaacacgctgtaaataatgagtcatcattcattttaatcgaatgtgtaaggctgtttaaattcacctccaaaaaagtgatgcgacattttcagtgagataaatatgtatttggcatctattctgtaaaagaaaataattataggtattgataagtttttctatgtatccagcacaatgtttatgctgtacttactattttactttctggtaaccacaatttttcttttgttcttgccataaatctagtatgcataattgcacagcacataacattccaattctataaaagaagaaagaatttaatctttaggaagacagatcacatactatatagcaactagtgaggtgttttagagaaataattacacatctatttttgaaatgatcaggaattaaagaactctgatatgtatatattaatgtatttttctattaggataatagagaatttttaacaacaacaaaaaaaaaacagacaaaagcctgggtgctcacacctgtaatcccagcactttgggagatggaggcaggaggatcatctgaggtcaggagttcaagaccagcctgggcaatatggtgaaaccccatctctactaaaaatacaaaaaaaaaaaaaaaaaaaaaaaaaatagccgggcgtggtggtgggcgcctgtaatcccagctactggggaggttgagcaaggagaattgcttgaacctgggaggtggaagttgcagtgagccgagatcacgccattgaactccagactgggcaacaagagcaaaactccatccaaaaaaaattacagcaaaacagttttatataaagtcaattttcttagcctaacatgtacctttttacaaatcacaggttatttgctaatcattatacagtgcaattaccatcagacgaaatgacaaaataaactacgaatcaaagaaagcaagttatcatctagagtgaaatattgtttaccaaaataagataaaatatgtactttaaaataatattaatctataatagcaatgttaaattatttggcctaatatatagcagttgttattacagaatatttaccgctctcctgctatatagaaaacctctaattaatcattgagatctgtatgttattttcaaataggatgcctaaggtgtcatactttgaggcacaaaatgtttggaggtattgtagaaagagaatgcagacctgggtttaaattataaatctgcggatattagtggcctgagtaatcctgagcaaatcacttaaccacactgagtattttttttcctttttttaaattgatgaactttatttttagagcagttttaggttcacagcaaaattgagtggaaagtacaaagatttctcctatacccccgtcctcacccactgatagccttcctcagtattgacatgctataccaaaatgttacatttgttgtaatcaatgtacctacactgacccatcattacgacaccaaagtccaatgtttacattagggttcactcttacacatcaagtagttttatctctaaaatgaagaacacaaaatttatcaaacagattgttttaataatgacagtgtatatgaaatgtcggcctccaagtaattgtataatacatcataacaatgagggtgataaattattacttgatcaaggaaatacatacagtgtatctcagcaagtttccaactcagaagtcttacttatatatttaatacacatgctaatattaggctattatggcaactctgacaactgagttatcatctcacatatattctcaggcaatggaatccaagatttcaagcaaaataaacacatttcaggacagtgggtctgtattttcaaaaacatatttaaacagcaaaggaatccagaccgaagtcatggcaaaactgatacagcaacttcgatattttatttgaagttaaataataatagttataaattagagagaagagaggcagtgtcatgaacctcagttggggtaaaatccaaaatagttaaaacgagacactggaaaatcctgagccacaggaaaagccccttctctaatttaccttaatttaaggtaggacaagtttagatcaatttgcaaggaacagaaggaattaagattgagttttagtttgatgcgtgtgggaaaagctacactctgaagcagttttattgagtgaaagggactaagtagttagcaagttttgacaaagaacaaatgcagatctggaaggccttaaagaacccaaactaagtagatggcttggctcaggagtggtgaggaatccagggtcagtgatacataagaccttgttttggcatagtttttcataattttctctcatgcataaatgtttaatttaaatcacacaactattacattgtaaaaggtttacaaagactgctgtaatcgtttcaattttttaggtgaagaaaaataagtcttgttcaagttatatgatctttcccagtaacacagctgataaatggtagaattgggattacaaacaagtttcccttttgtattaacaacaatgatgattgtatttttttgtttacccagtgttttttagcattgatgtttttcacaataactcaataaagttggcaaacattgaagagttctaaaaaattgctaggacagcccatatttcaatcaaatagttgttaaaaaaaataccaccaggcctgccctacaagagctcctgaaggaagcactaaacatggacaagaacaactggtaccagccactgcaaaaccatgccaaattgtttttttttgtttgtttgttttttattataccttaagttctagggtacatgtgcatattgtgcaggttagttacatatatataaatgtgccatgctggtgcgctgcacccactaacttgtcatctagcattaggtatatctcccagtgctatccctcccccctccccccaccccacaacagtccccagagtgtgatattccccttcctgtgtccatgtgatctcattgttcaattcccacctatgagtgagaatatgcggtgtatgtttttttgttcttgcgatagtttactgagaatgatgatttccagtttcatccatgtccctacaaaggacatgaactcatcattttttatggctgcatagtattccatggtgtatatgtgccacattttcttaatccagtctatcattgttggacatttgggttggttccaagtctttgctattgtgaataatgtcgcagtaaacatacgtgtgcatgtgtctttatagcagcataatttatagtcctttgggtatatacccagtaatgggatggctgggtcaaatggtatttccagttctagatccctgaggaatcgccacaccgacttccacaatggttgaactagttcacagtcccaccaacagtgtaaaagtgttcctatttcttcacatcctctccagcacctgttgtttcctgactttttaatgattcccattctaactggtgtgagatggtatctcattgtagttttgatttgcatttctctgatggccagtgaagatgaacattttttcatgtgttttttggctgcataaatgtcttcttttgagaagtgtctgttcatgtccttcacccactttttgatggggttgtttgtttttttcttgtaaatttgtttgagttcattgtagattctggatattagccctttgtcagatgagtaggttgcaaaaattttctcccattttgtaggttgcctgttcagtctgatggtagtttcttttgctgtgcagaaggtctttagtttaattagatcccatttgtcaattttggcttttgttgccattgcttttggtgttttagacatgaagtccttgcccatgcctatgtcctgaatggtaaagcctaggttttcttctagggtttttatggttttaggtctaacgtttaagtctttaatccatcttgaattgatttttgtataaggtgtaaggaagggatccagtttcagctttctacatatggctagccagttttcccagcaccatttattaaatagagtcaatcctaagacaaaagaacaaagctggaggcatcacgctacctgacttcaaactatactacaaggctacagtacccaaaacagcatggtactggtaccaaaacagagatatagatcaatggaaccaaacagagccctcagaaataacgccgcatatctacaactatctgatctttgacaaacctgagaaaaacaagcaatggggaaaggattccctatttaaccatgccaaattgtaaagaccattgatgctaagtagaaactgcatcaactaacgagcaaaataaccagctaacatcaaaatgacaggatcaaattcacacataacaatattaaccttaaatgcaaatgggctaaatgctctaattaaaatacacacactggcaaattggataaacagtcaagacctatcagtgtgctgtattcaggaaacccatctcacctatagagacacacataggctcaaaataaagggatggaggaagatctaccaagcaaatgaaaaacgaaaaatggcagggttgcaatcttagtctctgataaaacagactttaaaccaacaaagatcaaaagagacaaaaaaggccgttacgtaatggtaaagggatcaattcgacaacaagagcgaactatcctaaatatatatgcgcccaatacaggagcacccagattcataaagcaaatccttagagacctgcaaagagacttagactcccacacaataataatgggaggctttaacaccccactgtcaacattagacagatcaacgaaacagaaagttaacagggatatccaggaattgaattcagctctgcaccaaggagacctaatagaaatctacagaactctccactccaaatcaacagaatatatattcttttcagcaccacagcacacctattccaaaattgaccacagagttggaagtaaagcactcctcagcaaatgtaaaataatagaaattataacaaactgtctgtcagaccacagtgcagtcaaactagaactcaggattaagaaactcactcaaaactgctcaactacatggaaactgaacaaacaacctgctcctgaatgactactgggtacataatgaaatgaaggcagaaataaagatgttctttgaaaccaacgagaacaaagacacaacataccagaatatctgggacacatttaaaacatgtgtgtagagggaaatttatagcactaaaggcccacaagacaaagtaggaaagatctaaaattgacaccctaatatcacaattaaaagaactagagaagcaagagcaaacacattcaaaagctagcagaaggcaagaaataactaagatcagagcagaactgaaggaaatagagacacaaaaaacccttcaaaaaatcggtgaatccaggagctggttttttcaagagatcaacaaaataaatagaccgctagcaagactaataaagaagaaaagtgagaagaatcaaatagatgcaataaaaaatgataaaggggatatcaccaccgatcccacagaaatacaaactaccatcagagaattctataaacacctctacgcaaataaattagaaaatctagaagaaatggataaattcctcgacacatacaccctcccaagactaaaccaggaagaagttgaatctctgaatagaccaataacaggctctgaaattgaggcaataattaagagcttaccaacaaaaaaaagtcccagaccagacggtttcacagccgaattctaccagaggtacaaggaggagctggtactattccttctgaaactattccaatcaatagaaaaagagggaatcctccccaactcgttttatgaggccagcatcatcctgataccaaagccgggcagagacataaccaaaaaagagaattttagacccatatccctgatgaaaatcaatgcaaaaatcctcaataaaatactggcaaaccaaatccagcagcacaacaaaaagcttatctaccatgatcaagtgggcttcatccctgggatgcaagactggttcaacatatgaaaatcagtaaatgtaatccagcatataaacagaaccaaagacaaaaaccacgtgattatctcaatagatgcagaaaaggcctttgataaaattcaacagcccttcatgctaaaaactctcaataaattaggtattgatgggacgtatctcaaaataataagagctatttatgacaaaaccacagccaatatcatactgaatgggcaaaaactggaagcattccctttgaaaactggcacaagacagggatgccctctctcaccactcctattcaacatagtgttggaagttctggccagggcaatcaggcaggagaaagaaataaagggtattcagttaggaaaagaggaagtcaaattgtccctgtttgcagacgacatgattgtatatctagaaaaccccatcatctgagcccaaaatctctttaagctgataagcaacttcagcaaagtctcaggatacaaaatcaatgtacaaaaatcacaagcattcttatataccaataacagacaaacagagagccaaatcatgagtgaactcccattcacaattgcttcaaaaagaataaaatacctaggaatccaacttacaagggatgtgaaggacctcttcaaggagaactacaaaccactgctcaactaaataaaagaggacacaatcaaatggaggaacattccatgctcataaacaggaagaatcaatatggtgaaaatggccatactgcccaaggtaatttatagattcaatgccatccccatcaagctaccaatgactttcttcacagaattggaaaaaactactttaaagttcatatggaaccaaaaaagagcccgcatcgccaagtcaagccaaaagaacaaggctggaggcatcatgctacttgacttcaaactatactacaaagctacagtaaccaaaacagcatggtactggtaccaaaacagcatggtactggtaccaaaacagagatatagaccaatggaacagaacagagccctcagagataatacctcacatctacaactatctgatctttgacaaacctgacaaaaacaagcaatggggaaaggattccctatttaacaaatagtgctgggaaaactggctagccatatgtagaaagctgaaattggatcccttccttacaccttatacaaaaatcaattcaagatggattaaagacttaaacgttagacctaaaaccataaaaaccctagaagaaaacctaggcaataccattcaggacataggcacatgccaggacttcatgtctaaaacaccaaaagcaatagcagcaaaagccaaaattgataaatgagatataattaaactaaagagcttctgcacagcaaaagaaactaccatcagagtgaacaggctacctaaagaatgggagaaaatttttgcaatctactcatctggcaaatggctaatatccagaatctacaatgaactcaaacaaatttacaagaaaaaacaaacaaccccatcaacaagtggacgaaggatatgaacagacacttctcaaaagaagacatttatgcagccaaaagacacatgaaaaaatgctcatcatcactggccatcagaaaaatgcaaatcaagagtatgtctttcttattaaatgctatgtataaaatgttactaaaataactagtgggataaacataatgattgtctccttatcatatagatattcttataccagcagtacttcgataataaaggatacagagcatttagattgggatgtgtatgtgtgtgtgtgtctgtgtgtgtgttgtactttgtgttctgatatatagagaaatgcaaaattgtctcaattaactaattaaaaattaaaagcaatatagtcagtttcttccaaaatgtcttcaaagatataatattggaaaattcattctaaattttcaaaattgaaaaaaaaaatgtgtgcagtcctttccataatgagtttcttttctgaggtccatatggttggtcttttgcttctattttatggtttcaaaatttaatcacacattgactcgctggaaacacacaagtgattatcttggaaatgagaccgaatatatttggttttgtttttgaaacaagaagctgactctcggtaatctccactgctgttatttaggctgggcatgggcatctgcggtgtgttgggcactcaatcattttcaattaaatgttccaatgtcttgtgaaagtcccataagagcttgcagaatcacgattatagatccatagaggaaatgtactttttgaacatttccaggtaagcagttttcttgcaacaaaaagccaattattttgagggattatgtaaatattcactggaaaaccctaaaccaaacatgtctcaatacattgaagacaccattttggaatggtactgtcatatacgtttagtagatttttcagacatgcactcttttgcttatagatttaaaatttgtatttttaaaaatacattaatttttgagattacatttaagcattttactctttaaagtttggaaacattgcatatgtgtttatatagcaaattcaacaacatagtaattgtagaaagtttgcagaaaaatgaataatcactcaacattttaaaaattgaaatactatgattatttatgtatttttaaaagttagtctattgctctaaggctattcaataagatttgcacttttttttgcatttttttcgtaacatgtatcataaatttggaactaatatccctctagtagtcaccagtacaacttactgataaatggattattgtccacctattataccagctgttaaatatcttgactatcatttctgcataaatatacaaaggaaataaaatgtgaaaaatagatttaattcagaatcactttagagatgtgctattattttaattaataatgaaacttgaaaaattcttattccttagccacttactcaaaaaaatacatcctaaaagaaattttcttgcattacacatcttttttacacatgattttacaatatgtttgtaacctcaatccaggtatacaaaactcaaacgtatagaagcttctaaatttcaaagctaaataaaataataaaataaaataaaataaaataaacagcaaacaatgccagtgtttaaaagtatagaaaatatgaacatttacgaaaacctccaatgtgaataggcagactttctcagtgattgaggagggctctaaagcccaagtcttgcaaatccagagtaccacaagtgcttcaaggaaaagagaaaggaaagtaaaagataagactttataaagacggataatagagcagcacctatgataacgtggggccaggagatgtcatggaaatgtgaggcatggtggacttaagcaccaccactcaaaattgcaagaatgaagatagtgatgcaaccatgcagaaacaacattgaaaatataacagcaatgaagctcagggacaagaaaactcctaggatacagcactctcactgtgagtcactagtgcagtgtttttcaaattgcaaattgtggcttattaatgagttacaaaatcaatttatatgacttttttttaaaaagaaaataatagaaaaggaaaatgtagaaaagaagaaagagtaaagaaaatgtcacagaatataagagaaagcaagctattatttcttgtatatatgtgtttacatagtatgtatgcttgtcaaatatattttttattgtatgtcacaccttaaagggtttgaaaattgttacaataagcatatcagctatgagaaagctgggtattgcagaaatttaggggaaaaaatatgttaagtcttagttcctgtgaaacaacactatataaaaatgtgtgttcaaactaaagatatcttagctctagaaaacaaggttgtcaccaaaactcctctgtttaataacagagaagtttgatcctttgagaatgattacatctaaatgatttaaaaaataccttcaaaactttcagttttaagtttcaattatcttcaagctttacttattcagagcatttaatttttcagctatcagataaatgctatggactttactattattttctgaagatcactggttttaatattagaaatgaaacaaatcatgaagcagaagcagtagtataatgataacacagtgtttaatatcaatactagatcttataaggttaatgagcactattttatattaaaggaagtaatgggttgtaaaattactcttgtataaaaaataggacctcatcattccaaagtgtccttgaattgaatggtttataggcttctgattgattaggatgcttatagaaacattttatatagtgtcacattgttcttatgatgtacgcaggttgataaaatggaagattctgagaaatgcacactcataattttttcattatgaaaacacgaaaatattgcaaagagttctaaaataaaattttaatagtcaataattttcaaataagttgaaaacttttctgaagaatggttattgttaaatatattataaagattttatgcttaatgtacatatacacagtagatgagagaatgaatgcttactcaagatattttgatcttttaactgggaattaatattctgtgtttaccaaagaaaagaaatttaagtatagattaggcatgggtaattgttttgcttcagcagaaagtccttaagagattagcttaggcatttgtcacaatcttcaatatttttctttcaatgcaaaaatctgtaactccttcatgatcatagcaatcttatcttttctaaggataatcttttatttgttgtgccataaattggctggaattatacagtttctagtgcaatgtgactgctttgttttttgaaactgttaaaataatcatcaatgaacactaccttatcagtaaaaagtagttcaggatttaataggcactctaaaaatgccattattttcaagtcttctaaagagcacttacctctttcttgcataggttatttcctgtttcaaccacaagcttctaagcttggaggcaagaagtgccttaaaaaatcagaatcaagtagcacatgctgatattaatcagaatagaagtccattttttatttgctatcaaagtttaaaatctactggtgaaattaatatgcatgttattttcccctgtaaagctaaccgataatgtaatgagactcctcctacttgacactatactaatgtcataattgattttaaaaacttgtataagtagataaacttagaatcagcgtttcaatttacagtttaagggagtaagtaggcttgagttttccacttcaaacttcatttattactgcatgaaaatgtctttgaccctgtcagacagaagtactgatagtgatgtttgagtagaaacttttgttgttgagactggcaacaggagtctttgggattctgaaactataaatagaagaaaaaaagtctattgcttttgataaaatcaattgtgcagatatgggcaatgccatctcaatactgagcaaactctaactcatgataattgtgaggatggaataagaaactgaagaacatatccagaaatatttaaaacaaaagagtagaggccaatgagaagaaaagctaaggaaccaccttgttctttctcacacacaaatgcacaaagacacattaaattaatcaatacaagtaactgcaataggtgaaaaaacacagtgggaaatctataatttaaaagataagttgtttaagagtttacttcatctgggtaatttattcaatcctctccttccattttctctgtacatttatgcttctgtttcagtaccaagtatctgaaatgttaaaacacaaatccaatttaacaaatgagggtactaactatattaagatgcaaagtttttcaaacatgtctattttcaatattatgttaaacagctctgggacggagaaatgtgtatgtctaatcacacattcttaatgacattaatgataatacattgtgcatatttcaacagattggaaaacaacaacaaaaaacctccaagatacagtaatgaaatttactttggctttaaaattgcctttgtccttgctcttcatgtgcacacttgcatgatgacttcaaggacagtatttagtaaaacaaacatcatttaccttctcctttttctttagcttgctttgatgttgtgctaaaggcacagagaagatggaaaagttgggttcattagagctgggaattaactagataataatggatggagaaagggaaaaaacaaaacaaaacaaatctgattgactggatcctaagactggctaaggagggaagtgaacgggagagggccattaaagaataaaggaaaatagtgggcccctcagttaagactggaggttttgatgatatataagaaagtagcgaactgaacaaatagaagtttgtaattagaaaaaaaaatgagacttttatggaagtaacaatgatgacaatgtgaagtgtgtcatcatggcggaggtggagctaacaaaataattattggacaggagaaaatcagagaactgagaagtcaaggtattagtgggattataaagacaaacattcaggacaataaattttgaaataatttttttcttgctccaatgacactattctcttgattttttttcttagaattcttagactgtattgccttttcttattttctaagtgagtgtattctaagatgttcaatgatgtgctcttttgttttctttctttagcttggaaacatggttggcacctgtctctgtaaaaattccagttctgccctcttccctgatttctaattatttatttaattaattgctggatcaagatgtatttcttggttttcttgtaacacttgaattcagcatgttcaaaatggaaatcatcagtttttccctctcggctttatttcaatctcttttctcttttgtttaattgctttgttggttagtctttaaattgttgtttttctttttggcactacagttgcacctgttgtacagactagaggctgtaaagagagtttcttttatctcttccttaacaccatacactgcctagcttcagaaaagttgtatttactttttcagggctcttttattgtttattatgtgctttcctttattatttctctcccttatgtaggaacttgttatctgtcttaagaactgtatatatggcctctttattggattttccccagatgtttcacattaattttcttaaaggaaactgatcaggaatactcacttctcaaaaatcaaaataagataatttcatttttaaagaaagtctagattcttcagctggcactccaggctggctgtttcttactttattttttttttcttactttaaatgtacagatgtttcccccacacctgtaccccaaacttttcaatttctttgcttttgttcatgttgctcctgtttatgaccaaaactttccttcccacatttcattctctcttctatattggtgtaatcatcagttttctggtgttaaactaaaataatactttttcatgttctgcttttcgtcctatagactttctcttggactaagctacttataagcatacttgttcttgattcttcatacacaacttatagtttgccttttgcttttattactcccaactcaattatcatattaagtgcttttaaccttatcttttcttaatttgtaattttttgccaatagcaattttacttggtaaccctattctcacttctttcctgacattcccaatatttaaattaatcttttcaacattatggcctcttgagggcaagcattctacccagggcttagactcctattgagttggtgtattctatttctacttgtcaaaattctgctataattaaacaccgtaatcaagagttttatttttcataaagcctattagaatgtccctaatataggtgatgaatctttctgatgtttcataactcatttatgccacttactgtatgctaccaaatattatggttgatgacatatatcttatagaaactacttgaatataataccacagagcagatatttattttagttttttatacacctcacaatccctggttcaaaaacttgcacagatgtttttatagataattatttgataatttcatgcatttatcaagtacctattaaagaatatacagccatttttaactaacaaaaaagaaaattcattgatctcttatctgtcttaagatataagtgtagaataggacattttctgttaattaaacctgtggaaatacattgaagactactctacaataaatagttctgaagttttgtttttttctcatgcatacatgtataaagactatcagacacatagatgtttcatttattatattttaaaatgagcctaaattttaataagtaaaacactcaaatttaagcttgcttattctacaatttatttgatatttaaagaattgctgccataaaagtatgaaatcaataccaagaataaaagaaaatctaatttcattacaactaaattgcacaaaaatgaaatctgaggagaaaacacgggttgaggtacactgcaatgacctaaagcaataatttttcaataattaatatgactttacatatatgtggaatgctatttataaattatgtttagaaatatttacttgatcttcaataacaaaaaacccttagtgtagttttaaaatttgtaatgatcactgcaataaatagacccacaagtagtccttttgtatttcttgctgtttttcaactacatccttaacttctgacaggaagttattaaaaagtacatttttaatcagcttcacagttttcagaatactgctcttttagattgctttgtatttacattttaattttttaaaaaagctaccaagcaaccccagcttctaatatttctcctcttctccttttttcttcctcctcaattatttagcagtgtttgggcttcgtttagagatgtaatctcagtctacccaaaggggaaatgcctaagctaaagtttgttcaggattcttttttcctgaactcaataaactttaaatcttttacttgaacaattttcaaatccatttgtcaattaatttacatttacttatcccttcctttctctaaaaatatgataacataaatattgggtgtattatgcatagactcttactataatttcttaatcaaaaagtctttgcttaaagcagaaaaaggatcaagatgtttttgtaactcctatcaccttatttcactttccagtgaaaatatcacaggaaatagagagggattaagtttttaaaaaactccctggttttaaaactttaataatatttactgcccatctgtggaatttctaaactgaaataaagccagtagacatcttcctatggtgacatggtgcataaggcataaagttactgactatatgattctgctttgtcttaaaggaagtataagatataaatatttgaaatttttgttcatttttcttaagatagaacaagatgttgtcttgaatgtgacatttttttcaaataggaaaggtgacttttttttcatctaggaaaagtaagtttaattttcataggattaattttagtgctagaccccaacatatcctatctttatgaaaaaaaggcagcacgaatcccaagggggatatcactgtttggaaaaaggagagactggagaatttcaaattttgcatagtgtttaactctgtccctttccacaccaggaagattcttttcctaggagacctacatgatgggactcacttctccattactgaacttcttgttttttattcctgttaggaagcaagaacctaaaagaggggatgtgaacgattaaggcaaagaaagtttccattctcagtacctagggagtgaataatcccatagtttctaagcacagaaaagattagaagtactgtcgctatggtataactgcacagaataaatgccccaaatacaaattaaagaatttcactgaaaattagtaatcaggtttgtatctggttcaaaatattaaataaaaatcaacatctgagagacttgtggcaatacctttcaacagtaatttataaattaggaattgtgcaacatacaggtaatctcttattagatatgtagaaaacaaaacaccgagttaataggttttctaaaaaaaatctgttcagattgaaaacaacttcatcaatgaacgcctcaggatatttgagaataaatgtataaacatattttgtctctctttttacttttaacttttctgttgttctaggaagaaacttctgaaaaaatatctttagatataaggaaaaataaacatctttatagttttatagaattgatagaaacaaaatcaaaatgttatctcaaacataagttttccaactttttaattatttgggctggttaaagagaaacgttctggatggactaagtgttctcatgtaaagtggcgtaacgttatcgtctcacatctgatgctattttcactgtcctgttactcctggtgtctagctcctactcttttttcagccttatcatatagaaactgtagactggaaccacttttaaatgatctctttggatgcctgaacagcagggaagattgttcttcatttgtaacaagaaactcaatcatttctgggttccaattagagaaagcctagggggccctctttattaagatgaaacacaaattgtatcaagacttgctaaaccacttaatatttttatggtgatattaagaagcttgaacattttaaatactaattgggaatatgtgtaggctatttttaatctatgcataaactctaacctctatttcattaaatttgcatcttatgatgctattttgccaccttgaagatttatcacagagactaggatcaagaattcttgaaggatttagatcagtgtcagcaaagacttacacaactatatcctcctgttaaccaattttgtagatgctgttgttatttcctttgaggaagtttttttttttttttgaaaaattttgttttaaaatacagattggcaacttgaatactttatctagatctttacatttctatgtaaacaatttaaaaagacatatctgaatttaactacatatttacagagccatttgctttaagatgagacaaaaaagcttataaacagaactaggaaaaaatcatgacagtttagattttggggggtaattttgagtatacggaagtgtataaatacatgcatacaattttctctgtatgtttaaaagttcaaacatcaagaaaaggttgcctcctaagatactaaattacttcctttgagtagtattataaagatgaattctctaaaccccaaagtatcaccagtataacttctattttaatatgggtcttatgtgactttgtggaaagggcaagatttctacattgctacaaatcatagttttattttatcattttttgctgcttcaagagatgttaacgatgtacatagcacaagacaatctagcctgttataaaataagaattggtaaattcaaatagcagttaaaagatttaggataaatgaagcatgttgagaactattaataatttggcttttattaaggatactaggggagtgatttgtctatctaattgaacgatacatattattatatttttccaatatattatatttttccaatattttatatacctagtttcttcacttgttatcatataatgctctttcagaattttcatagatatagatctgataaaattatcctccctttttgttttttatcttcctgaagacagaaaaaaacaaactgtttactactttctacttacacatttactacaacacttcatctctgaccaccaaaatgtgtgttaccaacaatcagtttcccccaccaacaatcagtttttcatgagacaccaactgggtgtcatgtaattcaattcatgtatacgtcagactgcagattgaggtctcagtcccacaagattgcctcccatttcagatgccactcacatgcactaggctgttacctgtacttctgaccaactgcctacaaaccatgatttccgtgacttccttcttgggtgttgttaatttggtgggatagctcacagaactcagggaaacactttgcttattttcactcattaattataaagaatatgacacaaaactatcaaaaccctaggagaaaacctaggcaataacataggcatggtcaaagagttcatgatgaaaacgccaaaagcgattgcaacaaaagccaaaattgacaaatgggatctaattaaagtaaagagcttctttctgcacagcaaaaaatactatcatcagagtgaacaggaaacctacagaatgggagaaaatttttgcaatctacccatctgacaaaggtctaatatttagaatctacaaggagcttaaaccaatttacaagataaaaaacaacaaccccatctgaaagtgggcaaaggatatgaacaggcacttctcaaaaggagacatttatgcagccaacaaacatacaaaaaaaagttcaacatcactgatcattagagaaatgaaaatcaaaaccacaatgaggtaccatctcacaccagtcagaatggcgattattaaaaagtcaagaagcaatagatgctggcaaggctgtggagaaataggaacgcttttatactgttggtgggaatgtaaattagttcaaccattgtggcaggcactgtggtgatttctcaaggatctagaaccagaaacaccatttaacccagcaatcccattactggatatatacataaaggaatataaatcgttctaatataaagacacaaattcctcaaggatctataaccagaaataccattcgacccagcaatcccattattgggtatatacccaaaggaatataaatcattctaatgtaaagacacatgcacacatacgtttattgcagcactgtttacaatagcaaagacttggaaccagcacaaatgcccatcaatgatagactggatgaggaaaatgtggcatatatacaccatggaatactatgcagccataaaaaggagtgagatcatgtcctttgcagggatatgaataaagctggaagccatcatcctcagcaaactaatacaagaacagaaaaccaaacacttcatgttctcactcataagtgggagttgaacaatgagaacacatggacacaggaaggggaacaacacaaactggagcctgttgcagggttgggggtgaggggagggaacctagatgatgggttgatggatgcaggaaaacaccatggtacaagtatacctacgtaacaagcctgcatgttctacacatgtttcgtggaacttaaattaaaaaaatctatatctatatctatatatctatatatctatatctatatatctatatagctatatctatatctttatatctgtatatctatatctatatagctatatagctgtatatctttatctatctatctctctctctctctctctctctgtctcacaaaggcaactgatgaacagcgagatgaggagatggatagggcaaggtatgcaggaagaggagaggagcttccatggcctctcctggcatgcttccatcttggaccttctgcatgctctgcaatacagaagctctccaaaccctgcccttttaggttttatgggggcttcattaggtaggcataattggttatatcagtgaccattgatgatcatctaaccttcagtcacctcagctccctggaggttgaaaggaaagtgggactgaaagttccaacctgtatttacccagtaagctgcccaggagcccaccagaaacttctgattagaacatctcataggagcatctcagagcaaaagattctcctatcatgcccaagggacttagaagctctgtgtcagagtctactatcactcaggaaattacagtcatgcaccatataacaacactttgatcaatgatgcaccatatataggatagtggtctcaaactattataatactgtatttttactatacattttccatgtctatacactcaaatacttaccattgtgttacaatttgttccagtattcagagcagtaacatgatgtacaagtttatagcataatcaataggctatagcatattacctaggtgtgtagtaggctgtgccatctaggtttgtgtaaatgtagtctatggtgtttgtataatgacaaaatcacttaataacacatttctcaggctatatcctcatagttaagtagcatatgactgtataaacgtcttaggagtttcttgccaggaaactcttgcaagggtaagaagctaagtagaacaaaaatttctgctatcaccactatctattggggcttcaggagcactatgttaggagctgggggagaagacaaaatacatatttcttatattacaagatcacactctccaagtgttgtcagtacttaaacacttgatcagttccattaacactgccaatcttcttgttttgatattgtttacaatatttgttattatttttcacaacttttatcccttctacaaaattttgttagaatggtatatatccttcctcttagaaaggatgccatacccatagacatcacttactcagtgcctctgttctaattgtgttcacaataacataaaataaattcaatatttctatcaaatttaacaaagcttttgagaaaatgattccatgtgataaaattatgctgaaattagaaaactttccatactaagcctagaaaaatattcatcatgttagaaagcaggaggtactagatgaagcatcaactatagaggaagaccagggtttgaatacttctctcatctatattcttatatgcagcacattttaaaaagtgatattcatcaaagtgttcttttgagaattacagaaaataaatgtaaattacctaggataacaactagcagatggtaatagatattattaacaactatttctatcattaattattacagaagactgaaatttttgaagaggggaatctatggttcatttatccttcttttctaaaagcatattttgagatagggctcctttgcaggaattttgttaaaagaaaactcacagtaaaaacctctaaaagaatgagaaaagcagcagaggtgaaatggaaaagattcaggtggtttcaagcaaagctgtgccacaagggtggctctaagtgcaaagatttttatcttttttatatttattttatgttttatattcttattttatatgtatttgtatgtatgaatatgaatacttatatatttaatattatttattataataagtattatttagtattcattattattatatatatttatactcatattttatatacatatttataaaaattatatatttatatataaatataaatatttatatttacttatatccaaatacatctgaggaagatttgccccaatagcctaagggtagtcttccaatgtggggtgtgagccattagcagcagaatctgggccacacgacttgagcaggggaccagaaatgactgctactgggactcaacaaattagtctctgaatacatatctgcttagttaaatagaatagaagcagattatatttgctatacctccgactcttttgagtgagtgtgtgatggtccttttggtatcttatagaagttagcatatggttgtgtacaaaatacatgttaaatattaaaaaattgatttactaaatttacacatatttaacatttcttatttttgctatctacatgcatgtttcaatccaataggccagaacctgttttgtggacaaaggatggcggagaattaccagatcctgaccgaatggttgtgagtggtagggagctaaacattcttttcctgaacaaaacggataatggtacatatcgatgtgaagccacaaacaccattggccaaagcagtgcggaatatgttctcattgtgcatggtgagtaaattttggaaaacattatatgtgaaaggatgcataacttgaaaaactatttaaatatatcagaattttaagtgcagtgaacaaaattatatggtttctttttacttcaggacatcttatgagatatttaattatgagatattatatttaatattaatatattcccagtcagactgataaaattgtaacatacataaaatttttttttgtaaaaagctttctcaattataaatatacttcttacatgttggctcgtaaactatattaatgattgtctttattttattttttattttttttggagacagagtcttgctctgttgcccaggctggagtgcagtggcatgatctcagctcattgcagtctccacctcccgggttcaagcaattctcgtgcttcacctcctgagtagctgggattacaggcatgcaccactatatttttagtagagatgggctttcgccatgttcaccaggcttacctcgaactcctggcttcaagttatcagcctgcctcggcttcccaaaatgctggaattacaggtgtgagccatcacacccggctgattgtctttaaattctataaataaatgtgttcacttataatccagaatcatgaaaattacatttcctttaagctaatttttattgtattatcataaacatatactttataacttctgtaatttggtttcacaaagaatgacagtgtcattgaaatgcagcaaaaatgggagtgtacaatattagcaataactgcatcaatttcactgaacaataatttaaagttcctacagactttttcttgactctatttacctcacaatttgagtaaatataacaaaatcacagaaagaaataccagtcgccatgagtgaataaaatttctgttttttccaactttcaaatgccacaatgggtttttcataaggtagcttcttttagatattgttagatggagatgaatttttacgagattgatgaatattgcaataaacaaaattagtcaggtttctttactacagtacttcccagactttattgtatatgtcagggtgcattgcgaatctccactaggaagagccattagccaatgtaagattttcatcatatttcaccaagaaaacttttctgggactagtattatattcaacataatattacagtatactaaatgagtgttatacataacacagtgctgtcataaatcgtggatcttagaaactatggacaaaatatgtttatttgatatctttcccttgaatgcatttatggaatactaaaagacatatgtgtttgttccatacctttccaaaaagaaatttgggggtctagtatatttctttgtaaagagattaattttagagagaaattaatctaacaagtgttatttttcccaggtattcattttgttcattttgccaaagttggaaaaaattaatatgttcagtcaatatacagttttcctattttcaagttgcattattgtataaaatctctcagtacttaatactgctttgctatggtaagcaacgaaaggctcacaatgaataggctattcatgtaaaacatctagaaaatagtagaactaacagttgaatttctagcacttcatgaattgtacaaaattcaactttggaaaaattagcctaatccaattagactgataaattgtatttaaatgtggtaatccctgtagacagaccctgctggcctttctgccagagagaatgttacaaccactgggtgtgtcaggaaggtaagtgagatccttagagcaggatccaagagtagatttcagttgatgctccctggatgtttagatcatgcagtcatgtaaggaaagtgtagtctatctgattcaccttaattttccaagtgcttctctcacctaacagtttctgagcacctggggatatgttgtatagcatgtcacattgtgtcaaaagcaatatgacataaaatattgagaattagaagagaagtgacagaaaaaataatatacctaaatgaaaagtatatcatttttttaaagtagctcatcaggaaaattcgtatattttttcagtgcttgcaagctagccaacagcatgatttcctaaatagccaagctacctttaggtagttggcagttgatgtatttctaataaatacttccctaagcactttgtgagaagtcatttttggctttgctttttgaactacaattcatcaaaagcatcccatagattaatgctattcatgctgctagataaatgctgtgaagttcaacagtggtttacctaggattattgacacaagtaatgagaggctcgatgaaacagtgaaaccatattatgctgtgtttaaaaggggcgccaattgggttcatggcaaaataaaggttttttcccctttgcacgctgggtataatgtttcattagtcactagttgtataaatataaaaagctactctcttcttttaatggtttggctgtttcaaaaccttactaaatgatgaaatttgagtggcatttcgatctataatgaatgctgtatgcatttttggaatggagtgataagtgatcatttgtgagaactttacccttttatcttttacaccaaggttgattttacgttagtggtgataatttaatatagctctagtacagaggatttttcacgagctgagacccgtgtctttgactctaccacaattgcttagattctattgattcttaacttgatggagttctgagcactttcctgtgaaatcatctactatctggatgccgtcataatagttagattttattgtttgggtgtcagtgcattatttaagtgcactattaagcattattaagcattatttaaatgctaccacatttaattgttaaaaccactgacattttgtgttagaaacactggtgattcccccactccctcctaattacacctttaaaattttcagcattaggatcacatgtagtaatttaactgccagtctaaaatttatcctcaatgaaaggcctacccagagtcaccatactaatacctgtaagattaaacatcttgcttaagaaacatttgcactgtgaaggttccattaagaaagaaagtagcacattttatgaacaagcttggcaatggaaaaatttatctgttaaattggtagccataattatactaattaattcctctgagcacagtagtttctattttcttctttataaaaatgttgaagtatatctcttgtgattattgtggtcatactatttatttatttacaatggatgattatatccatagttttaatggctttgaatatcttgacccattgctattcttaacatgtgaagaactaggatcaagataaaaactaattcactcacccaatagatatatagtacttatctaccaggtacaaaggagcaaagataaataacaaacaagaagattatagtttaatgtggaatataagctaagcatttagataattgtgacacaaaatagaagagttatagggagctatagtaagatggtcatacaatgtggcagatgttcacactttgtgtagttccaactgtatggaatgtttaaaaatactaacatataactattatttataaatattataaatataaataatcataataaatatttaaatataaatattatgataaatattattacaaattaataaattcatttataatatgacatactttgtaaatggaattactcagcaaagtgccagttatacagatatataataaattagactattcttactcttatatttctagtagtcttattataccaaggacaatcaaactccaagggtctggtaagaaacttgcccatgagttgcatacagttattgctcataatcttccctgaaagctaccggaacataaattaggttaacgctattgaaaaatgagaaaactctaatttttttctatgagatagaaaatgtcttaaaatctcaacaatgttaacacattgaccatgtacaaagcaagacataagttatagtcacccttgttctctaatgcaacattaagttcagaaaatataggttgaatatcttgtcttcaagcagaaactacccgaatgtgcatccattcactatagagaacataacagatgataccattttatcatgcaaggtatggatctagggaatgaccaatggtattatgctaattctgttttgtgattggaagcaatgcatactcttctatttatcatcaattgattaaaaatacactcataaaagtgacagaaatgtacaggacctggaaagctttgagaaagaacatctacggaaagtgagaaacgcaaattaccacattccccaaaccctaaacttcttccctcttaaccttcccagtgtctcttttacctccctttaaactcattagagaaattaataaccactgctcaaaatacaaatgggaaatggacagatatgctgcaactctttaatatcacctccattctcaaagcctccctcaggatctgggaagaaatacagtaataccagcagaaaaaatagtaactaatttctccttctgccaatagctatactatcaatggcaggtccagattgtagacaagggtagcaaggataatgtttagagctttggaggggaacccatgttgtctcacagttatagcagagttgagatgcactattccataaagtttttttgtaatattcccctttccttttcaaatttattttttcttttaccgtagtaaccctatgtgagtgttaaaattattttaccactgtgctaacttattcccttacttcattattttctccttgtatgaataagttttataacaattcatcactcctttattatcttaactcttgctatcatttagaatgaaattgcccactatgcacctttccacagatttcgttttctttacatgtatgtattttgcttttctagcaaatttgacctttacaaccatgtaagataagtaaaatctctataattagtattatgatactatatagtaagttagaatcaagatttgcttatatttctgtcctgctaataagcttatcacgatttctgataatcttagtctctctaaagtatcacttgactgttacggtttgttttatttgttcatgtgtctattaaacagtgatggaaatatgatactgctttttatgtttccaggataatttacttcagaagtaacatatatagagaataggatacgtcatattttattgttagttggtaggatacattattttaaaaagagtgttctggagttttagaattttaatagagaatattactgctagagatctctatgtgctttgatctactaaaaggtattaagctattaaatgtgcctttctagctcctaagaatcaataagattgctactttcatttcactcagcttttattgttaataataaatgtcaaaaaacactcaaagacagaaaatcgtacacatagatattatagactgctggatcaagccaaacttccaagctttgttgctcatgtagacacatatcgttttcagagactgtaggtaaacacaggttccctcttccatcctgggtagtgattctccatttcagttaacttgcttactatgggagaggaaaaattgagtcatggatggtatcttttctttcactttaacagacatttccaatccatctatcatatttttcaaatatgtaacagatgtgcaaaatataaattcatttcctttagagttgtcagtacttgaccctaaatttagcaaaataatatatatgtcagtgaatgcagcaatcattaagcaacagattaggaacatcatagagtaataccttaaatttgcttttaaaattttcttgccatagaactaagcaaatattatataataatacatccctaatcttagagagatatatctctcatgtattcatgtcatgattatcaatgatctgagaacttcatcacaatacaatgaaaaatgtccttttgtgcttcatagtaaatgtgtagctaggccggaagattgccagcccctgcaacgtgcatttactattaaattatccagcaacgaaacatctagcagtattgagaggctacatgatttttttaggcaaggtgatctttacaggtcacactgagaactaggagagtacatcttctagctcgtatgggtggctggggaaggaaaaaaagaagcctggattatggacagatgtaaagcctagcaaacattaaaaagggattcaactaaaatctgttctttcacatggaaacagacctaccagttggtaagttaattctgtgtactcgtaatgagcatttttcctttggagcatttttcttagaagcatagatggaaaatatacagtggagggaaaaaaggatggaaaaggcatccatactgagcaacaaacagtgtgctaatggaagagccctatggttgctgctctcatctctggttgagagtttccaggcagtaactagttggatgattcttaaaacagtatcttctttaatcgctgagataaaacgctatcatttctggacatgaataagcagggagagctctgatgcctgtaggaaaggtgtacctctgactggatgaatatgctgttgaactctgcagagagaaatggaatggcataaaatagtagagacaggagcactattttcattacaaaacattttaaaaggtgtatgtgtgtgggcacactcaacacagagttaaggcttaattatatgtctctgttttaagatgagcataaagtaggtacactaaggtttctgcttttagagtaaaaattctgttgagagatgccattctgaaataaatatttctatgtgctagatgaatcacagaatgaaatgtacataggaaaaaaccgtcattcctgccttctatcactaaacaatttcatcattaaaaaaatattttctcaacttatttacatataatattttctctcagttgcagtataaaataaggtaaagagaaggatagaatctgtggcactcggtccttctatatttgtttatgtggaaataaggccaggctgtagctttaccaaaatgtacagagctcttctacccaagtatatgtgtgttaattggctcatttgttacagatttcaagcaatatgcaatggcccatgggaggaaatgttggcattagttttcagaaacaatggcattcctaaatagaagacatagatttttacataaaacctgctttgtagctttttacagtatagttttcacacatattgttacaacatatatacttgtttcggattctaaaatttttccttgattctattctacccttctctccaattcatcacgaagttccatcaacgttgcttccaaatcacattcccaaagtgggcacttctctccatcatcctctctggcttagactagggtcccttgttccacactcccacaccttcaatctctttctcacatagcttcaatatataaacgttttaaatgcatatctcttcatgtcgtttccccatttaaacttatacaaaggcatttcatcatccttagtataaaagccaaaccctcattgtcctacttttccaagtcctgcattttatggctgctgcctacatcggtggcatctctcatcactcttcacacacccacttctgtctctctggtcctctttcaactcctctaagttatcaaggtcattttctttatagaaattttgcctctgcttggaatgcttgtccaagatgcacaagaaatgctgccagaaatgctgatctttgcaagattgatttcttattcagatctcagattaaaagggatttctcagtgaggccttttttttccattaccatctaaattgtcccccagtcacatatcacttcaattaaatactctacaagacatatatcattatgtgatagtttagctatttgtgtgtatgtacatgtttgtgtgtctatatatacatatgtatatatatgtacacatatatgtatgcatctgtatatgtgaatatattatatgccctcacactagactatgacctcctaggaaacagatattttatgcatcttatttatttctataccgctagctcttagaacagggtcttctaaatagtaggtgctcaataaatatttatttaatatttaaatctgtttctgtctgtctctcccgctgttttcaagagaagaaactttagtgaagcaatacatacacatatacacatatatacacatacatacccatatctacatatatacacacatatacgaatatacaggggtgtgtttgtgtgtgtgtgtgtgagtgtatatatatatatacactcatacactcacacacacacacaaacagccttgacttctggataaaatcagggaaataattgatattccttggtcaccaaaataataacctttagtttttatcccatattgaaaaaaaaaaagacgtgtttacttagcaacccaggtgaaatgtgccttacttatagaattaagtgattcaaaacataaataactgtgcatagattaatttttctaataaaaatttttgcaattaaagagttatgcaattgattccaagtatgtgttttcatctttttgcaaagttaaatgactttgctaactgaaattcaaccttttataagagagacctggctgctcgtgagagctctgaccattagaaatacaggtgataggagtggatattaaaagtgaagctcaatagatgcttattcacaattattcttaacattatttagttttattcagggattgtgttctaaggatatgtcaaagtggacctattcattaatatgcatgtgcaaaaattacctgtaaatagacattcatagttttcttaaattataggttagcaaggttataataacaatctttgaaacattattaccttatcatttaatttttatttaactaaacttttgtatttcaatatagaatattgcatttggattcacgttattacttttaaaaactggcagttaacaaacatttatgtcaaaattagaattcactaaaattagtgccgtgtgcatagtactctcttcaccctccaaaatgcagcacagtttagttaatcctcaaaaatgttggttcaggattctggaagctactttaatctttgatgaaatttatatattaaatgagaagcggtatcaagataaacctaaaacatatttcgggtaagttacatggtgataaatctatagagtaacataaaaatataacctagtatgggttaagcaactattttacagaatgaaagataaaaatggaaaaaaaaagtcatgcaagaaatcttaaaacagtttttaatcataaggatattatatttaagtatgggtggattactgcaaaaagtgatttttgtattctgaaatgttcactgacgttaatatttttaaaataacatacatattaagatcattttttctagtatacatgagattatttttcagttgagataattagagaataggaggcaacaaatgtatttacttcattgcattttgaatctgaaccaacgcccttatggactctcgtatgtcctgacgtcatgtgcaaacgttttttcatgtatcattttttgagtgaaggtgttttgcttttagaagatcaactctgatccatcactggttaaaaacttggtctaaaaggatttatataaatgaccaagccgaaagtcttcagtttttagatgaggaagcatagatgcatagaggttaaattacatgcaaaatggctctcagctactttatcacagagcctacatgaaaaatcaaaatatgtggatttctcagtcagtatttttctactatatcacagttctccttgtgtttattcatagctgatttacgtttttcttttaatggatgacagtaatattctcttacattttcacagaacttaaagtattggaccaaatcatgtgatttactttcaggtagagtattttaaggaaagagtaggaaagggctcacaatattgaagtaggcggagctaaatgatataggataatccacttcaaaagcatttttttcatacttgaaatttcactttacttttgtcagtttggaatgtaaaaaagtattataaaagaaaaaatgcatacattttttcaaataaagcattgattttattcatgaagttttcttgtaattacatagaactgacagttaccgcctacagtttaaaattgcagtacttttcatattttaagaacagctttttttttcttgtataagcattccatttagtatgagaaaccagtggaagctatcagagggatgaaaagggatttattcaaatataatttttaaaagagttcctttttatgaagcagatggggttactatatgactgttgaggaggaggcgtgtactggtgagttgggaccttctcaacctggtggttatcatttaagtaagagctttggtgctgttatccacttttacactgtgatccaaataggctgctgcatgtagctgagcataatgggagcagataaatgtccttctttttttgtacaggcaaaagcaaataaagtaaactttcctcttacaattgtttccaatgtcagtcagtgcaattagtagtaaggaaaactaccctattattttttaagatagggaaatgtgagtacctttcaccaaaaaagacacatcttaccataataattctaatgatatacctcaagttctaacacttctacatctccactaataactcttagtgtttatttattctttatcatcctgggaccacccctgggggaggacattagtgacataaagcagaaagaaagtaaacatatggattccagactaaatggtaacaatttttctccctattgaacactagtccttggagagaaacaagcagcttgggcttctgggactctttagacttaattttgtttcgaaaatccattctgaatgccatttttaaaaagataaactgccagaaaacaaaacaagttgacaagttagaaattattgtacactgcatttgtagagaacagaacatacctttaacctgaaaagctcgttattggaaaaaaggtgctgtaccactcttcagtttattgtatacagcgcttgttggaagtgatttccttttgacaaggttatacaggatctgttgtgctctaataagctccaataacaaaatgtggtggcattttctaaaaaatccttcattagaatataaagaaaaggacacttttctgttgtttttaattggatgatattatttagagctctaacacttttaaaaacactgaaaacctgcgtttagaatatagaactattctgtatgctgcattttaatttttttaatactcctttagactggaagactcttaacaggaattatgaaaaatcatctcacacatgataaaagggagagcaacttttttcagggattaaccatgtataagcttctgttactgattcatatttttaagaatgatactattgcctatctactggtatcattatcatcaggagtgatgttattgataaagcacctgtcatttctagaactgtggtccatccctgtagtcccagctactcaggatgctgaggcagaaagatcgtttgagtttaggagttcagaaatgtagtgcaccatggccatgcctgtggatagccactgcattccagcctgggcaacatagcaagaccccatcttttaaaacagacaaacaaaaagcacctaccacattgaaagcatagagctagccaccctgatgaagtgcaaaagtttaccatgaagttcattctctctattatcttattctcatttgttcaggaaacaaaaatgcaagcaatatatgttaagtatcaaatgaatgttacagcttctcaatttccaatcccagattttctgaagagctttgagttataatcagtgtactgcatactttattattaaaaagagctaaaataatagagtttacaaactgattatgtaaactagagcaaatttgaaaatgttattataacatcgcacatttttaatttgtgttttctactgagggacagaaatggatatagagctagtgggacacacataactgtgggtcctcccatagcagtatgtcatgaatggaagcattattggtcatggggatttgggtgggacaaagtgaaggaagcagtagataaactcaaaaagtacaatgggtggtgaaaggaaattaggtgggcttagctggtcaaggaagtcttcacaaaccaggtaggaatcaggctgagatgtgagagtagcattttgttaggtatcaggaaaggatggctattctgaaatgaaaagctaatgagggattggctcagagtatatttgtctaagacaaagtgatattttaaaagacaaaaacatgttaatttataaggctgagcctacagtttattgggagagggaaacacataaatataaacatgtacacgggtgtctgcaaaatgcttaaaagctcagagaaggaagatattaactctttgcagaactgggccatgctttccatatgagatcctatttgaaccaggatttaaaggatggacatgaatgagataacaaatgtgaaacagggtgtgcctctgagaacctacagcacaaagaacaggaagagctatgtctagctctgtcaagggggtaaagcacttgtgtcagaggcagatgtcttcttgtatgctaggcttaagcttctttctctacattaacttggcacttgaaaaattaataaaacaagccagacatgtatcctatgaggaactctagcccctgttgtaataggaaaccacaaagttatggctacctcaacacaatagtgggtggtgcagttttggagttcctatcagagtcacgcaggttaagcaggagagatgatggactgatgaatttatcatattcaagtttagccatggtcctgtaaacagattttagtttcctgatttggcaaatgcgttgttttagctgaaattatacttctgcatgtgactaagttcttatagaagtactcagattatttacattgcatttattggcaacccagcgttcactcacatgaataacttttgcagcctagttagactgtctgcacaattatgaaattgttctattgacttgatttaggggttctgtctgttattgaaataccccaaaattttccttttacatgaaaacagtactttatatatgttataagtgaaatgaaaagtataatttattacaattcaaactttatgtgtaggcaaaattataagaagatattttcatatcttggaatctttacttttctcagcttcctgtcaataaaaaggctcacactgccttttaaataaaacttcttagatagacagatagatagatagatagaggtccaggatttacataaaatgtgtacatatataaaatatatgtataaagatatatttaaagtttagatcatgaacactggatctgtatgaattcatttcatatcctatctaaaaccatcaatttattttagtgagtattatttattttaatataccatgatatgtggtatttagtatgtggtgagaataaattggctaaataaatttaaaacacataattatgatttcataatttcagagaaattgtcattacacattcctatatattgtgattaaaacttttaacagcctgaaaactattgttagattagatagcaaacaaatttcttattaatgagagtattttaaattctgattttgatgaacttcattgaaatttatcttgtttggatttaaattgagtctaaataatttatgtataattactaatttctccgatcagctctagacaaaatttactttcacttagttcatttttcaaatatcttttttattagaacatattttatcaattgctgactcttcactctttataacttaacatctaaaaatacaaactacaaatatataatacgacacaattaatttcttttgtaaatttgaagtgctgaacctatcatttataactacatttttatttcaggcaattgcatttatagttggttaaattaatacactctccaaggaacacacaaaaaaatgagctcatcttttgcaatgttgaattcagaggtgaaatatacaaattgagctgtgtattggatggttatcatttctaaattccaatattcataaattatgcatcacatgccataaatttgaccatgttttatttatagttgtcttggtgtctgtgttcaaatatcatctgattaatcataggatgttaccatataaggcatatattaagacactctgacactgccatgtcatattaagcaaattacttaaaatattagtataactgcagattatcttgtcctatggaaaaaattaataagttaatgttgaaccagtatttaacatttttatgatgtatgtgtgcatgtatataatttctctgcgtatgaattagtatttttcaatattggggaatattttaagcggtatcattttacaagggataaaatgggctgcagtttccaccctgtaccatatttgatggagtcttcttttcattaacagtgtaagaggtttaaaaatgtacaggattccaggcagagctcttctcttgaagacctgattgtctagtgggacactgagagcaagaaaagcagagcgggtggaaagtttaggtagaagacagacgtttcatacaactgttctggtctttcagagaatttcaactaattcaattgatcttacatcgttcaattttagttgcttcccattaatattctggtgctgaatatttaggttattttaacttttactatttcacaatatagctgaaataatggggtggtctttaacaaataatgaaagaacagaataaaaccctcaaaattattagaaaagcaaaaatgttttaaatgttttaaaacacatagaacaaaatgaagctagtagtagttaaaaacatgtaacagtaacaggcatcggtttctttatgacaagtcattttttaaacccaattgtcattttggcactttccaccaaattactttcagtcaatttgtttttagccacatatgatgtcagagaggaggataagggagaatgctgaacagataaaaaagaaccaggctatgtgtaaataataatttgtaatgttatttatttgtgtattttaaaagattctaaggatgttgttttgaagtggattaacaattattaaaactactcatctttttaggttatttgaatattaacctatggaaaaatgtatgcttaatgcgtttttacccttgtaagaaataaagatatggtttgctttatacaagaatgctcctagtacttgaaaatatatagactgtctttaaaaaattcaggatttattactgcctatattggttgacgtggtataagcggggcaaggttggggggactccaaatactactataataataataattattattattgtaaataaaaacaaaacaaaacaaaactaaactaaaaacaaaaccaaaatcctgtgatttgtattccttctcttaataattcagtgatggggctgattttgaaagactacttttcttattagaataagatccaatgcaatagtatttgaactgattatgtgataggaaataaaccaacatgttataatctgtgataaatttggaaataacagatcatttacatggagttttaaatgcctggtattattgtttgttcataaatttgatatacttggaagatattggtctttgcagttattaaatgtatatattttgagatcctaatcagcaaataattttgctaacaaggtattattttctattttagataagtataaaagttaaaattacacattttttaaatttagaaaatgttttcatttacctccagtctgcctaaactgtttaagaaatcttaccttgaaataaggagttattataacaattagtaaacaagaagtatctttgtccatatacataatctttcttcatttataatgtcgttaaagtcagttctactttatgataatggtagatcgcactccaggctttacccattttccctagtgattaatgcagcaccactgagttttaagaaggttgttttcttaatctgactggccaggaagcattttccctgtcgaaaaacaggtgtaaacatcaatattcaagataagagagcgatctcatgctgttttctggtgtatccagtgtagaaaattcagcgggtagagtctacagagtgagtagggctatttatcagcagtaaagtactagaaaatgtttggtgtgactcaaagactttaactgagagaatgacaggaaaccttttaatacaaaataatctgtcaaacactcggaatatatgagggctatgtgacaaacatgtgaaatcaaacctcagcacagtaattattggtaatttggaaactgtttctaatttcctcactgtgtagattacatgcctattcactttagacaagatttgactctctgaggatctcactgaagttctcatagcttgacactggctgtattgtttcaatgttctctgtgctgctcttcatattttcagctgatttttagtgaaaggaaagaggatttgggcattaaacactattctttctgggttttattttttctgtatttgaagctacacttaacttttggcaacttaactaattatggattagaggttcaatgttacacttcaagtatatgttcagtaacccctcctaggtatgccgtattaaaataaatcataaacctttcagaatatcgggtgccatgctagttgactcaatacttgttaaagactcctaggtactgcaaaattattagaaggcgttaccagttaaccagggtaagaattgcaagactctaaactgtgcattaacctcatttgtgagaacaggagaagcaaaataacaataataataacaattggcttcttttgtttgtttgtttctaaagattgctctcatttcctatcattaagtcttcctaaaagaagaaaaaaatcaaaaagcatttaacatgcatttacacattgatcgttaacattttgttaatcttatatggtggtatatgtgtttatttctgtatgtgtcattctgtttacttctttgacaaagcatgtcatttttttttacctacatgttttttgctactgcatgtcaaactttttaaatgactcagtgaacaaatgaattcttgtcattttacattttactctaaatattgaaaataacctgcttactctcaaacattgctccaagtctttgctttgtgttggagcatgaaaaagaagtgaaaaaaatgacaagaattgtgtgacacagttttgtacctgatattctgttaaagcttgttaaagttaaacctcaataagttatatgtatttataatttgaatcatttgtgtttctcttttgtttgcatgatatgattttgtttatattttttttccactcaccagatgttcccaacactttgcttcccactactatcatcccctcccttaccactgcaacagtcacaaccactgtagccataacaaccagcccaaccacatctgcaacaaccagcagcatcagaggtacagtatgtttctttgttatagcctggaaagcacattaactggagctctgtagaagtttttagaaaggttaaaaacattgagattcaattttacttaattatgagaagtaattaagtcacctaaattgctatcaattagggttattggaatagaatatgagaaatgatggtacattttattttttttagtgttacttaagactattatcaaaatcttgcagaatatagatttaaaatatatgggactttaaaatgttggtcaaatttaaaatgttagcatgggacacagtttttgcctgtcttgagaggtaaacaaataaataagatgttcatgtgtgcagaggtagcttttacttttttaaaattctagtttaatattaataacttgccactcctctgcaactatgttaaaatatctatagttttgaaattgttctaaaattgacatagtccatggggtcagtataaattattctccacatagaacttgcaagtaaatattcaaaatacatgtatcccaaagtgatttgctgagtgaagctacttattctactaatagaatgttctaaaagtaaatatctgttgtctcagatggctccatgagtaatttctgatatcattatacaaataagaattttatttcaaagaaatcaaccttaaaaaggtgggaatatccataaaggcagaagaagtaactatgttgtggttgagaaatataaaaagtattcctgagcagtcattaagtggttagcagctgatgaggaaattaaaaaaaaatgaagccattatagaaaaacatggtttaatttctacataagcagtgctcagagagaatttgtcgtatttaagtctgtctttttcttatttcttatatatgtttcatgtcaccttggctctactaatatctgtgaaatttaacaatttaacttgaaattaatgaggactttatattattatatttaattcagttgtatgaaggttatgtttagcattattattcataattattaaaggttgttcagttagatggttttcttggaattttaattaattctagatattaagttgatttgccgtctttgatttaacagttataatagtctttgtttcagaaaaaattctaatgtctgataattttccattttttaataatgacatcaactatattatacaatgtacaagattgatgactaaataagtttaatggtagtagcaataagaatttctcagaaatagctaggtatgtttttgtatgactgaactttatttaagctaaatctgtaagtgagaagagtgtgaaggtctttcttgtaaaaaattatataaaaatgggaaaagagacataatgaaaatgaagaaaaagttagaagtgctttataatattatgtaaaatgaaagttatctaaagttctactttgctttaatttgtgatgctctgtaaggtttttcacaaacggcagtctaaataaaatgtaatcattgcatactaacacaatatctgctatactattaagttctgactatataaacaaatcacttcaatgggaaaggagggagatatattgactttttttaaaagatccatttgtaacacaaaaatctaatattcaattatgccttcttcttcaacaaatatgtattgaatatatgctatatgtatggtgttatgccaggacctaaaattatgacaactactggcatctaaaatcactagcaatcaaatgtatacatttctccccacccccaacaaacagtttttgtgcttaatctttattgaaaagtactattgttctttgtgggaaaatattacatgtggtcttccggtcttttgaaaaaaaaatccatagtattttgcttcagaggactatatatatgtatatatatataattctgtttcaaaggactaaatatctatctatctatgtaatttcaaacctacacacacacatttacacacacgccattatagactattatatgagaaaaatatttcaaagtgaaactaacaacattcttttacattggttcacatgaatcttaagtgggatttggtctattgcattttttttccttccaacttttattttaggttcaggagtacatgtagaaatttgttacattggtaaactaaatgttgctgggatttggtgtacaaattattttgtctcccaggtagtaagcatagtatgtgataggtagttttttgatcctcaccctcctggaccctcccatcctcaactaggtcccagtatctattgttcccatccttgtgtccatgtgtcctcaatatttagctctgacttataagtgagaatgtgcaatatttggttttctgttccacattaatttgcttagaataatggcctgcagctgcatctttgctgctgcaaaggatatgatctcattctttttaatggctgcgtagtatttctaatgcatatgtaccacattttcttcatccagtccaccactgatgggcatctaggttgattccatgtctttgatattgtgaatagtgctgcaatgaacatatgtgtgcgtgtgtctttatggtagaacaatttatattcttttgggtatatactcagtgatgggattgctggatgaaacagtagttctgttttaatttctctgataaatccctaggcttcttttcacagtgactgaactaatttatattcccaccagcagtatgcaagcattccatttctctgcaaacttgcctgcatctgttatttttgactttttaatagcagtcattctcactggtgtaagaaggtatttcattgcggttttgatttgtgtttctctaatgattagtgatgttgagcattttttcatatgcttgttagccacacacatgtctgcttttgagaattatctgttaatgtcctttgtcactgaactaaaatcagtggtttactctttctggtaaattcactttttttcaggtttcttaacatgtttttgtaaactttacaccatggatgcttaaagtgctcagataatttatttttcccttaaacactcaaccaacctccaagaagacacacatgcgtacacacacaaaaagatatgaacaaaaaccaatccctcttttttaacttaaagtttgaaagataacatttttaaagaaatcacacaaaaatatttttttaaaaagtttttttgtaagctgggaagttcatattatctattttaaaagaaaaaaatagtagcattgaattttaatgttagcctaacgcccatttttccttctatcctcatcaaacatctgaggactgcctaagtcaccagactcacctgcatcattaatattctagttcataactgaaagtgtggaggattcatttagtatgtaaacaatgttatcaattttacactgtattctttcaaattatgtgacgttgtttctttgtgaattgccttttaaattaaaacttttagatgcaattatatttgaaaatcatttatttataagtttgtgaaagatggttcaaaatcatgattaaaaaggattcataataagaatatattgcctacgaaaagctgagacctaaacagaaagaatattttcaacttgcagcatttctttttggtttacttatttcattcctttatcttattcaataatttgaaatcaactaaatgtatttgattttattaggtttaaattgtatttcttcaaatttcataaactatagcatttatctccatatttttaataaatgatcacaaataaatcactgttaatatctccatttacacttttacaactcctgctattgctggatttttcatcctatgatatgttaaaccaatttaaaatacatttaaagaatcacagctgtatctatattaaaaatcaagatgaaatggaatgaaagaaactacactggattgacagtgtcataaacttgagaatttgcgcaactcttcagcttgtgtttaaaatgcatccctatttggaggaagaagaacttcaaccacatggaataaaaacaggcaattagtatcttattacaaataaggatgttaaaacacagagaaatgaaccaacttgggcagctatgggaaagagctggattgagccctggatacatctttggatatgagtttcagttattttgtttacaagatgtttgaccttcgacggtgcaccaaattgagcatcagtgttttcatcagaaaaacatgaagcacaggtttgacttgagagttatataatatctaaagttatgaaaacataagcaatactcaataaatgacagaattattttttcagttcgttttagtaaaacaaacatgtttaccagcagttgtatcataccattaatgaaatggtagattttcccctataattacagttttaatctggcaaaattctttggtgttaatgcactaattactttttcatttcaattctatttttttgattgtatgaaacaaacattagatgaaaattatactagagcatatggtaccatttatatctatctgtctatctacctatctatctatctatctatctatctttcatctatcattcatctaccatctgtctgtcctttgaagtataacagttcatatacttttcatgaagtttaaagtattcttaatctatatcattttaattgtttcagcttttggaaattgcgtaattttttacagtggcctaaccaaccttaaaattcagattatatatatacatatgtgtatatatatgacacacataatatattatacatattatatatgatctatcttatattatacataatacaatgctctgtattatgttatatatgatatatgctttatattacatatgatgtgtacaattattccgattatatattatatatcatatgtgtacatatatgtgcacatatgtacacatatattatgtatgcacatatattatacatgttacttttttaggtcattgtgattttttaattaacttaatatagtcatttataaaataattccaagtgactttgatatgatttctagtattaatataagcattattttagcatggaatgtttaatttaataacgttctcatttttatcatataattttaatttcataataaaccatgtcataatctagtaatctttagtagcatcctcattttatagatgatgttaacttatttcaaattcaggagacatatgaaacatagttatatatttaagtggttatgtttatttatcataatttttaaataagaatttataactgaacttttatacttaggacagaaaattttctaagctaacaattgatatttgtttttacctgcacaggacagtaaatgcactaaatgtagagatgatctgatagatatggaaagatgtaaaccagtatacactgtcctattactaagagtggattcaaatacaccatacatttcaatgtaccagatagggaaagaaatccaaaaaatggtgattaaagtgtttacacaatccatgtaaaacttcaaatgaattgttgattcaaatatagatttagttttacatcagtctttgaaatggtagaattataattttgtactaacaaaaactacattatttgtctggtaatctcaacaaatttaattgtaatgagattcgttgcaacagaaccttagttcaaaatggtacggcacacaggaaaaaaaaggatttttttaaactgaagaaatcaaactgtcaaaatatctagaactagagttatattgacaaaactcacaacattttaagatgtgtactcaattcttaacaatttaattgtgcattagttgccttggtctgtttggggtgctataatgaaatttaactcagtgacttacacataacaaatatttacttctcaaagttctggaggctgggaaagccaagatcaagtcatgggtacattagttgcctgttaagggcccattactcatagatgatgacttctacctgtctttccatgtgtcctcacattgtgcaaggggcagagcagctctctggagcctcttttatacaagtacatatcacgttcatgagggcttcacctcatgatttaatcacttccccaggccccagctcttaatatcatcaccttgagggttaggaattcaacctctgaattttcaggaggacatttgtgtcctcaggaggacatatggtccaacagaccacagcactactgttgtgacatatgtttaaaaaggtaacgttaactaaaatacttaaaatgattctcgaagaatagaatgatttttagtatacgtctggaatgactataaaaccagtctagaaattatagacccataatttttagcccatataatgccattgtatttttaaatcatgtgcatcagaaaacttaattctttaaatgtagatgaatttagggatctgtttgtatcactataatcctaaaacattgctttctgaaagatcttaataaataactactttttcactctaaaagcatttgaaaccatcttagtgacttgtaaaaaaaaatcatatacacaaagttgagctatataaattgaaaataaaacaaagttaagtacacactttgggccattgttgaaaggttgggatgaattgtcaaactcatatttaatgtggacattttaaatgaactacagttgcctaaaatgtgcactacgaaagagtttcatttatattcagattctcttacctcaattgtttcatttttctgacttcaaaataaaataagctaaagcaaacaccacatgacatatgtgcacttcaaaccactgtctgaagcatttatttaattaaaccaggttaagaatcaataatgttctatcctgcccttctattctctacatcctttatatcaaaagaaatcaagtctatctttacttaatttttatttggtttcattactgtgtctctcttttccttcttggtttaaatgctttaaaaacagaatacaaagaaataaagaaacatcagaataaaagaaaaagcattccagtactgagggaaaaaaatgaatggaataaaatcattatagctctgagttaatcaccataaatgtactcaaatagaacatttggagtagtagaatatatcatcttgacacagttaaatcccaaagtgtgcaaatcaagaagttgtttatgagattctattatgagtgtttagctattaaaaatcttttttgttttattggtggtaataaaacacaatttgcacaatgttgtgagcttttaaaaattaagtgtcaatatgttggggtttcttttcttgacaaaaattaagtaattattcaatatccagatggtccatatagagaaacctgcttatctacaaaaagactgatttctatgtttagggtacaaaaatagtttaattttcactagtcttttaaaaaacaatcatgattatgtttagttgattaagttttaaaactaaatatctaaaatagttcatagtgaaaacaaggtagaaatgcttaaggaacaagcaccatatatgttctataggtggaggtactttcaaccttgctgcgagtatcacatcgtacatgcttttggagtggctgcaggcaggatgtgggtaggaatactggcttgggggtccaggatttttagttagccatggacctaaatatttgaatagttgcaatgtatcaagttgtgttatttcaggttagcatcgagtgctaaagtttttatttatattctaatagaccttatttggtctattagaatcaacatatataacatatcattggttatatataaccatttccaaaactaaattgagcatttccatctgacttgaatgaagttgaactctgacacaatttgaaaatctttaagtatttactgacttgtttgctgcatttggaaaatatctgagaaaaccttgtatttatattttctttccactattacctattaaaggaagcagaacatttatgctctcttctattttctaagggcactcttgtgacttgcataatttaaaacatcaaacattttttaaagtttcattttaaacttatttatttcttcagcttccatcaatttaaacagaaatcttcattctattagctttcatttcttttaaataaacaggtctatttatatagcaatgaaaatatattttcactgctctacatttagaagtgtcttaattgattttatagtagtaacccaagatttaatataatctaacagtatatatgttttctgaaaaacaatccctaagaaagaaaaaaagttccccagtataaaccattaaaaaattcatttttatataatatacatgttaaaataaataaaattgttataataaattataattattataattaaatattataataaaatatgtttatatttatataatttataatataaatttatatttatataaaataatataataaaaataatatataaataattaaatataattattataatttcagaaactatgtttcctatgaaatatcgaggctaaagtgagttattattaatctgttctatatttaagaagcatattctacatatataagtaaatgtatttctagaacatctctaaatttaaaaaaaaatcattaataaactggctgtatctttcttactaaccagtgaattaaatttacaagctgtgcctttgaagctgaaaagattgcaggcactgcccttgcttctttgacactccacatgaaacacagttaataacctcctgtataagcttggtgaaacaccgaattgatactaattataccaactttgggatagaagatgaccttgacttcagctggaactttctgccaggacaataaataagagcaaatgccacaaagcgtgacttctgagaagggtctaatacaatctattaactttcgggagttcatggaattccaataagtgttcagataattgtaatattttaaaacatctcttgcttcaataatacagtagtttcttatttctctagacttcaaataatcccccattagttttctatactcatttaaattaagctatggccagaaaattaaaagctacttgatggaaagtgtgtataaggtaactacaagacaaggaagcagatttttctgaataccttctgaaatatgtacataacatttatacagttttagtatcagaactgcttttagcgaagctatgacaacactgtttcttaaataaagaaatatatctattaaatgattgagaaaaacgactaagaaaaagaatttgccccagtgagtccacaggtttaaactattggaaaaaacctgtcaagatcaataacgtgtagctgtgtcacagttaaaattttgattttaacagagttaaaaaagaaagggtcaataaagttactataaatgctaacaggtaagaacagaaattaaactctcttcaccaatattgtttaaagaattacgtttgtgtccagagaattctgttcaaatggttcagttataataaattaaaatacctagtttaggtccacttatttttcatcttagaaaaaagagatggactcaaatatgcccagagctgttttgttactgactggtaagcaaagaaggctgaacaatgagtgtttacatgggcaaaagagaaagcaactgtgaactaacatgaaattacatcagagtcattgagaagcatgtgttttcaaaaacatttaaaccaattttgatatttaaaaagcgggttctataatgaaggacaatggtattctagggtagtctggtttacactgggtaaagtacaatgctcttagtacaatttttttctcttaaagtcatcttttaaaaatattaattttaagccccattcctccactctgttactctggatgtcagcaggaaactaatggccatctcaaaggggtggagccaaagtgtgtaaaataaggagactttttaacagaaggacaggcagtttttggaaactaataaagtaggaaaagcacaagagaactgttggctacagtaagatgctattagcagcactaggccaaaagagccaaaggaagtgagtgaagttatcctaagcaaagaaaaactggagccatttttgggtaccacttaaaaggagcagcagtcaagcaaggacacagccagtatcagaacctcaagaaaacgaggacactgggggacaggggaccaaaattcagaccacttttttctcttgcctttcaataggatattctgttaattgaattcatctgaaaatcaaggtcattgcagagaagtcagcattctagagcacagaacagggcaaaacaggacgaaagatggatttggagaccaaatggagaaggaagaacagagatacgtgtgctccaaatatgacacccaacttctttactcagagcagttacatgtcagattatattttagtttttcatttctcctataggcatacatactacaagtctataatagaaaactagtggctgggcgcggtggctcacgcctttaatcccagcacttttggaggctgaggcaggcgatcacctgaggtcaggagttcaagaccagcctgcccaacatggtgaaaccccgtgtctactaaaaatacaaaaaattaactgggcatggtggtgggcgcctgcaatcccagctactcaggaggctgaggcaggagaatcgcttgacccgggaaggggaggttacagtgagctgagatcgcaccactgccctccagcctgggcgacaagagagaaactccatgtccaaaaaaaaaaaaaaaaaaaaaaaaaaaaaaagaagactaataatggagttagaaatggtggtaaatggaaatacttaaaaacacttaacaattcactttaatacagatggtctccaaattagatagtttcatttaagatttttttgccttcacgatggcacaaaagtgatacacgtcagtagaatccatactttgagtaccaatacaaccattttgtttttcactttcagtcagtattcaataaattgcatgagatattcaatactttattataagataagctttgggttagatcattttgcctaactgtaggctaatgtaagtgttctgaaaatgtttcaggtaggctaggctaaactgtaatgttcagtaggttaggtgtattaaatacatttttgacttatatttttaacttacaatgggattatctggacataacgccatcataaatttaggcgcatctgtatgtgattgcttattgcaggctgcgttgggaaaagacagactctagaggatagaggacgcattatggaacttgataaggctgctttgttagtagatactaaccttataatttctaaaattaaatatgtttatgcatttcacttgcttaaaacaatggctggttcacaataaataataagggttagcttttataataattattcacaattttcttaaaattacccatccaaaaaacagaggataaaaatgactttgttcttttgtgaatatcaatgagattatctggcaactgctaggtgaaggctgaaatctatcgtagatagaccatcctttaaagccatgcgaggcttcttagaaaattaagctatgaatatgtctctcttgatttcaagtaagtagttaagtgtggcacattatgccaaccccccaaaatgccattttgtcataaggattattttgaactaaaggcacttgagaaccagtaggtagagaaaggacactgatctcccccttcctccctttaacaggagaaaaggaacaatctatcaccagagatgggagataaaccctggtgggaaagatgccaatccctgtagcagcataaaagaaatattgtcacagggactgggagttaaggctaagaaaaatctgtacaaacacagcttgttaaaataactcttatcttcattatccccccacacattttaattatttttgcactatggccatcctttattcaacctactgtataatcacttgggttttctcacttctttggctcctcattttccgtgatgacttccaaatacatgtaaaacaaatatttattcttttattctgtttagtttgttttatgtcaacttaattctcaggcccaattgaagactaagaaggcagagataaagttttgcctcttctatagtaggataaaacagaattgcattgtaattcttaattattcaatttaatgagatcagttatcaaataaataaaaaacaatttttaaacaaaagtaagccatttataagtaatctaccttgccaaatattaacacacccattgcaataataagttaaggtaatggcctttagtatcagaaataatctggtttggatgccaagtgcatgatatgcaagttatagtttaagatttggcttctccaactctaaaattattacgagcatcaaaataagtaaggactacaattttcagtcattatcataatatggctgatattctaaatacgagaagctattactataaaaatttattaaggatatcgatttagcttaaggaatttggacttattaatattaattgataccattttcgtgttaaaatatatttcattatcatttgctatcattgatttataaaactcactactcatctttgatatattgacctatgaagtcgcttatttgacttaaaacaatcattactaaatccaattgattgaaatacactaaaactttttcagtaaattaaataactatgaaatgtttgggatattatctaaacatattcaagattaggcagaaaaaccacattagttaaattccaaaaagttttcgcttcttacttagtgtatttttcattttaaataattgttcatcacagaaaaattagcttttaaaatactaaacaaaataaaaaagagacttccttatcctgcattattgaaataatctgttacattttgcaaatattctcagagattttattttaaacatatgcatgtgtactgcttatacaaaaaaattgatgtgaaatatttttattttgcatgctttttatcatttatgtcatgatcatcttaatatgtcaataattgtaattctgtatttcttaagtttttagtaagttttaatgaccttcctctgaatatgaaaatattaatatatggagtcattttatttttctaaatttataagaataataattttacaatattttttgcatttgttgttaggtataaaactatagtgaaacatttgaatacagataagtttaagttttcatgtgtatatttaaagtacaggcatgctttggagatatcatgggttcagttccagatcaccgcaataaagcacatattacaatatcatgagtctcacacatttttgtttgtttcttagtgcatataaaagttaactatcccatagtctattcagtgtgcaatagcatcatgtccataaaaacaatgtacgtaccttaatttaaagttgttttattactaaaaaatgctaatgatcgtctgagtcttcagtgagttgtaatttctttgctgctggagcatcttgctttgatgttgatggctgctgactgatcagtgagtgattgctgaaggttagagtggtaaggcaatttcttaaaataaaacaacaataaggtttgacacattgattgattattcttttcctgaaaatttctgtgcgatttctgtttgatgaaattttatccacagtagaactgctttaaaaattaaagtcaatcctctgatacccttccattgctttatcaactaaatttatgtaatattctaaatcctttgtgattatttcagcaatcttcacagggctaggcacagtgacttatgcctataatcccaggacttcgagaggccaaggtgtgaggattgcttgaggccaggagttcaagaccaccgtgggcaacatagcaagaccttgattctgcaaaaaattcaaaacaaacaaaaaataaaagcaaaataaaaacattggtcactgtatcttcaccaggagtagatttcagcttaagaaatcattttatttgctccaccataagaatcaactccctatccattaagtttgatgatgagattacagtgattcactcacatctttaggctctacttatagttatcttgctatttttaccatatctgcacttacttccaccactgaagtcttgaatgtctcaaagtcatctataaagtttgggataagcttcttccaaactcctgccagtgttgatattttgacttcctcccaggaatcacaaatgatcgtaatgacatctagaatggtgaatcatttccagtaggtttttaatttactttgcacagattcatcagaagaatcactgtcttggcagctatagctttaaaaaatgtatctcttaaataacaaaatttgaaagttaaaattattccttgatccatgggctacagaatggatgttgtgtttaacaggcatgaaaacaacattaatgaccttatacatctcctttagagctcttgggtaactagatgcattgtcaatgagcagtaatatcttgaaaggaatctttttttttttctttttctgagcagtaggtctcagtctcaacattgagcttaaaatattcaataaaacatgctataaatagatgtgctaacacccaggccttgttataacattgatggagcacagattagatatagtatatttattaaaggccttaggattttcagaatggtaaatgaacattggtttcaacttaaaatcaccagctgcattaacccctaacaagcaagtcaatctgttcttagaagctttgaagtcaggcactggcttctattctctacttgtgaaagttataaatggcatcttcttccaatagaggactgtttcatctacatttaaatgctgttgcttagtgcagctgccttcattagtgatcttaggtagatgttctggataacatgctatagcttctccatcagcccttgttgcttcaccttgcacttctatgttctgaagatgacctattttcttaagccttatgaaccaacctccactagcttcagactttttttctgcagctccttcatgtctttcaatcttcacagaattgaagagagttagggccttggtctggattaggctttggtttaagagaatgctgtggcagatttggtcttaatcaagaccacttaaactttctctatatcagcaataaggctgttttgctcccttataatttacatgtccaccggagtagcacttttcatctccttcaagaactttttgtctgcatttacaacttgactggcacaagacgtgtagctttcagcctctcgtggctttcagcatgccttcctcactaagcttcatcatttctagcttctgattcaaagttagaaatgtgtgccacctcctttcatttgaatacttagagatcattgtaggattcttaattggcctaatgtcaatgtctcaggaactagggagcctggaggagagggagaggtggggaaaacagctggtcagtaaattagtcagaacagacacgtttatcaattgtgtttgccttcctatatgagcatggtttgtggaatcccaaaacaattacaatggaaacatcaaagattattgatcacatatcactgtaacagatatagtaatgatgaaagcttgaaatattgtcaaaatccccaaaatgtgacacagacattaaatgagcacatgctgttggaaaaatggtgccagccgactaggtcaatgcagggttgccacaaatcttcgatttgttaaaaaaaaaaaaaaaaaaaatcattatctgcagagcacaacaaagtgaagcacaataaaatgaaatataggctacacaaacagacaacagctgttagtgttttaaggtctaagacatttatgagaataatgaacattgtggtaaaatagtactttgcctctttacttaatggaatattttaaccaaaattccatatttctataacatcttaatatttcaataatgtgttatttaatacatgacacaatatacagattttggaatgttctcttttaaaaagtcatattggtattgatttacaattaaagtgagaggtctgcattaaaattatggtggaaaaatagtataaatgattttctacataacatgaagtcactcaatgtaaaactttattcttaagtgacactcaaggtatgatgatatattcatcatatgctaagtttgtcataatacccctgaataattttaaattcatttggaaattttaaaatagtacaacagaatgaaagaagcagccttcaaagccatttaacctactttctgcatcgtattctaagtgaagaaatggaaccccagagaaaataagatatttacttatgaccatacactatttatttctataagaagcctaaaatattattctcctggatcatcctttcttccaaaatgattagtgataggtattcttttttatatagaaagtcttcagttgatatattctaattttatacatagttcaagttacaagactcagaagagatggaagaaaggaagactttaaaaataaaatacggggtgggcacagtgtctcacgcctgtaattccagcactttgggaggccaaggcgggtggatcacgaggtcaggagatcaagaccgtcctggctaaccaggtgaaacaccgtctctattaaaaatacaaaaaaattagccaggcgtggtggcggtcgcctgtagtcccagctactcgggaggctgaggcaggagaatggcgtgaacccaggaggcagagctttcagtgagcccagatcgtgccactgcactccagcctgggcgacagagcaagactctgcctaaaaaaaaaaaataaaaaataaaaataaaaataaaataaaatataagattttgttcattaatattgtaagacaaaagcagagggatcaaaatttgaagatttatattatttaaatttactttcagacaatgccactaagaatcattacttattaaagcctgaaaggccttgccaagttaaaagcttccattttttcatttacttttttttttttttttttttttggtctgagacggagtctcactctgtcaccaggctggagtgcagtggtgtgatctcagctcactgcaacctctgctcccgggttcaagtgattctcctgccttagcatcccgagtagctgggactacaggcgcatgctacctagttgcaaaattggaactaaaattcacatacatataatccaatttactattctgtaaatccttcttcatagtacaacagttaatttagaaaatcaaattaagaaaaacaatacgtataatatttttctggaagcacctataaatgtgcagaggtgttactaatattattttaataatacatagataatacatttgatctagtgaaaactttattgttctgaaatattctaagaaactttataattcttcttcatcaaattcagcagatgtatattatacattatttactatacatccccattccaacctttttggaaacttgtttttaatctgagaagacagttattgagattagttattttaatggcttttcctaaacatctagttttagtgattatttgaccaagtcttaaaacaagataaacaatccctattttgatgcttttgaaattcctgttcttacacttcttcatcattcctaccagtctagtaactttctcttctatccccattctggccctgaaagcctcatctcatcagaagtgctaagtgatacatcggtcagtgtggaggtgtaattgctttgtcttccataaactactttgctaaaatctattcaaggtcaaggctgtcactttcatctctccgtgcagtttggctctaaaatgaaagtgttttgtttaaattatatttgaaggtttaggtgttcaaaaactaaagggaatcacttctcaagtttaatctatgagacacaccaaaaaagtaacacaaacataattgcctgagcagcagtcaaatttaagcctgcagaataaaagccctgtgtattatttgcataactataacttaattttattagaaccatgaactttaatactgtgtccttgattattcattcataatctataagctgaggaacataattatggatatggagctgttagtgtattgcaaattactacaaatttgtagtaatctcatcactgttttattttaaaacttttccttgaactactactggccacaaatcattgatttctttaactgggaaaatggaaacatcactattataagacaatgtcaaataaaaataataattcatctttttggaaacaacctatcttaaaatttagtaaagtgaattttttatcccactatgtttgatgaattttagatttcattgggatacttgtgcaattgtgttataatagtataaaatagggaaaagatgatgttttcacgtttcctacacaattcatttttagttctttgtttttcatgcatttctaacttgctgttataagatgaaatgaacacaccatctagaaatgcaagctgactttgcagcaggttctttatagggacagaactttggaagagtcaccgaattccatggtctgtcttcgttttggtcaggagaaaatttactatatcaaaaaattcagtgaaattaggctctgagaagaagaaatgtatcatttatcatcaattcattctgtaatttttttgaacttttattttgcattgaacatgtagtatgataagcaacatggatgacccatgaaaaggttttcattgagaaaaaacacctgacttagaaggagaggtgagggaagagggtatttaagagaggatttttaatagagtaatcccaccagacatagaaggtgttggtacaattaaaatgctggggtagcagggttgggggtaagagtagagaatcatagatacatagattttggatatagcatatgtatttttttaatttctattttgaaaaactattttcatactgtgatataacaactccatgactgatactttattttttctgtagttaattttctaaatgttgatagttttatgacatttctcgtagttacaattttgtcctctctggaaacctcaggaataatacggctttccttgatccttaaatatgatttttatttgcaagatacatgtcttcaaacacaaagaggaattggatatgcaaagaaaaaggagaggacagcaaaaatatataaagagagcagtacacatttagtttgcctagagtaaatcataaaaggtaagcagtcgtgaaaataaatatatatttatctatgcacttattgattgaatattcagtattattctatagatagaaataagtaaattatatgatatatagtaggtcacactcaaaagtttagagcctattcaggaagtgatgagaaacaatttaaatgaaatgataaaacggtacttaggcttttgaagattgctgtgatatagtatgatggatggaagattgagaaagaaaggaatgacaagaagccattggagaaatctagataattaacaatgagagcttaaagaaagacagtggccaaaggcatggtaaaaagacaattgttccaagatattatttgggaaagtaaaattgacagattttttaaccaattaagtaagaaattttattttaaagaatgagagataccaaagaactgatgctaggattttagctttggtctctgggtgtttggtgcaatttatcaaagtaagaaatataaggggtaagggttttatggaaaaaaaataatgtattccatttaaacatgcagagttttaaaaagctttgcaatagccaagtgaagatatctaattaacaagtaggattgagtctagggagggaaattcttagcaattacagcaagactcatagcaccaaatgtttcagagaggccaagtgtgataacctgaaaagtacttatttaattttgccaggcgtggtggctcacacctgtaatcccatcactttgggaggccgagggttggggggtggatcacttgagttcaggagttcgagaccatcctggtcaacatggtgaaacccccatctctactaaaactacccaaaattttcaggcatgatggtgtgcacctgtagccccagctacttgggaggccaagacacgagaatcacttgaacccgggaggtgaagcttgcagtgagcccagatagtgccactgcactccagcctgagtgaccaagctagactctgtcaaaaaaaagaaaagaaaaagaaagaaggaaggaaggaaggaaagaaagaaggaaggcaggaaggcaggaaggaaggaagggagggagggagagggagggagggaaagagagaaagagaaagaaagaaggagaaagaaagaaagaaaggaaagaaaaaagaaagaaagaaagaaaaagaaagaaaagaaagaatgaaagaaacttatttaatttttatacagggagtggtgatgaatttagaaaaatcagttttaatgaagtgattagataaaagtcagactgcaggactttaaaagtcgatgggacataaaatatagagaaagtcactgcattctattattttaagaatgttgtctgagaagaaaatgagagatataaaacagatagaggacaacgtaaattcagttaacactttcaaaggatggcataaattaagcatttttaaatgctgtgagaatgctagggagaaaaaagagatgttgaatatattgtttaaaaaagagaagctgacaaaataaagccactaagggttcaagatgtcatggaattccttttttaaaattcatacattagccttgaacacatggcatcattctgtgtttaatgagtctgaggagagaagataagtttagacaccagtttgccagaaaagggggaagtactttcagggaaagtgggaaattaacagagcttttacttgatgacctgtattttctctataaattaagaggggattgttttctaaaaaggatagaaaattagcatggagggtacctttaaaaaagtggtgaagtttctaaataatggctgtgcaaatgaaaaagagggcttagtaggaacttaccatgtttcctgaaaaagattttctcattcattccttgaataattattatctatttctatcaggtattattgtaaactctggggaaagaataaagagcaagatggatatagtcaatgtttttataggaaggtgagaagataagtaatctttaaaatatatagagttctctgatttgctgtacaaggtcatcataaaggactctcctagggaagtgatatttgctagatatgagggacttgagtaagatgtgaagttggggagtggagagatggggaagaggaaggagtctttcacggataggaaatagcaaatgcaaagttcctgagtggaacagaaagaaaaaaaaaaagcttagcctgctcaaaaaccctgaaagagcaccaataagggtagaatgccgattgtcacaaaaatgatatgaaaatatgtggtagttgaattagaacctgcagaactttaaataatttattttaagaatttgagtttttatcctaggagtgattaaggaagagggaaagagagagaggagaggtcctaattggttttttaataaaatagaaacatagaattctggctgcaggggagcaaatgtgtaagaaatataccagaggggatggtgggagaaagtttagggagctactgaaataattctagtgaatgctgataagggtttagactacaatgtcagaattatagacagaaaggtacaatgattaatattagcatgcaaaattcacagtttttgtgattgtttgactatatggatgaaagaatgagaagatatcacaagcttccagccaaccaaacttaatggtgggtgttgccattcagtgagataggaaacactggtgacagaattatgaatttgttttgaacatgttgagttcgttgggtatttgatatctccaagtgaaaatttaatattgagtgaagagttggatatacagatctggaactcagatcaaatagtagtacatataattgatccaaggcaagcttgggttcatgccagaagaatatacaaagagcagataacatagtccttaactgaggttagaaaccacgaacttgtagcagtgcaaatttacaatgtttaaattatttttacagttcccagtagtccatattttaaatggatatgagtgctttgattgagaagatataggattatgattaggcaagtacaatgaaaggaagaaaccaaggcttctagagagtgatggtctttcatctgtaaagggggatgatgggctggccaaacacagattaatttaaaaagatgagcagaacatgaaaggaaataagtgcacagtaaaccaagaatttgttgccagataaaggaatactagaattaaaaattctgcagtaggaaactaggtgatccagaaagtggccagatgagtggttagccaaattgctgtgaaattaagaaaggtttttaaatgatcaaatcatagctaaaatttaatattaaagagaaaaatatacaaatctggagctatgaatttggaagtcattgctgtataattatagatgtatagatgtctctttcatttggatactggaatttcccagggtcattatgggacttggtatggaggataaaattatgaacctgatagcaaaattggtcaagaaaattggaagattcaccagtggatgggaacagatgagtggatgacagcatgagccaccaaggagaggatgaatataaaatactgatggagcttaggttactgattcaatccagggcacttccttcatgatgtcaaagtagctgggattattaatcactaattataggaacacagattcaaagtaagaagatatataaatagatagggtgtattttatcaagcctgcatttgcctggtgagctgtctatacccttccagatcttgtacagtgcaaatgaggaatcctttgaatccacgggatcgatgttgctctttgttacagttctgaattaacatgcaaggttattattcttttgagttcccctttcatttatgccattttgacagtgccatatatgttaatatagtatattccctgagtagacagatgtccaattttattctttcttaattacaatcacaattctattgtgccaccctagggtgatataaaagtcacctggattcaagtccagttgtgaaaggcctcattcaccaacttagagattatccttcagaactgtgtaatttttagtttctcttcaagtctgcacatcaggcttacctgggaaactttctaaaattaaattccctaagtttaatatttatgctacctctagagattctgatacataggtctaagtttgactcatagaatctatgatatttatagctctttggaacagaaagttttgaaaactattggttcaaaatcggttcataaaaggtataattttaaattgtgtttcagtggtttttaattttatcacagagttcaggtgtccatgaaattttatggatacctcgttctgacccctatctataacctataactggtcctctagttaggatttgtgatggaatttatcactttgtaaaattattcagtgtgagaaaactgaaaagttatttgaaaacaataggcttaaagcaatgctatgtattattttctgtttatcactcctctccatcttaacccattgtggaaaggaaattccccttcctcttcaaggagggaggaggttgttcatgtttagtgaacaactatagaaaacagagatagtatcctcctccttaacagagaccaggttgactgctcagtttaataaagatgatgctttactctagagaaaatggcaaatgagtgccacgttttcttgctgtccattataaatactaggatttctaactcccagggttcttaagctgtgaagaaaactgactacgtgtacctgcaaccacctggcccattccccattttccccatgggacttgggccataaggggaaccaattcaaactgatgctcctgctagttgcaatagagtaataaatccttttttctctaatccaataaccccatgtcttctgccagcatctatgaaactgtggaagatcagcttaacttgcaagcagggtaaaatctgactattcaaagttcttgacacgtctataaataaaaattaagaaaacctacctcatagaattgctgtgactacaataatattgctgtgagcgtaattaataaatgtaaagtgtttagaataatgcctattatatatggaataatctcaaaaaacttatctattagtattaccagtattcataactgagaaatatatccactgtctgcatcactcacagatacagatccatggcatagacaatagtcacagtaaaacttcatacctttaagaattcatccctacattaaagtctttgtcacactaagttagaggcaaactcaaatgactcctgggatcaggtaagtgagtggaaactgtgccaaagtggagagcaaagattacttcagaagggggtggcccaaagcattttctgctgattattactatgtagaaaaaattgcggacccagtgttgccaaattaccagattttaaaaaggaattcgtaatatcacaataggacttttttaaaggttaaatatactttcataggtacttggagccaatggctccaaataaagtctgggccacatgcagaccatggatcctttgctctattaagaaagataaggagtattgatattcttttataactctaccactgagaaaggaagatagtggttgctgcatgagggattgatggaggagaatgatcttgttaaaaacaaaacaaaacaaaaaacgaagagtttccttatacctttattttttaatgccaaagtaaataacattccagttacaatagcataagagttacacattgttatctttgaggtacttgtgtttagtcaccgcaaacactaaaatctgagattaatggcatcattggaagggatttggtgcaatctaatgttaaaaccctgaactatcacaggatagtagctcatgtcaggttcaacacatgtcactatgtctttgtcaaaattttaaaagatcctgtcatttttgtgaggttactgtgatgccgtggggtgcctcagctcacagtgagggcgccaaactctgacaccatgctgtattcctgtgtgcacagaacatagcatgacaggatgaatattacgcctcatcaagaattaaatatttaacatttcccgggcttttagtctttacattaattttgtcctattcataggttggatctagtccaatgcttagcaaaatgataataaatatagaagaaaaattatccctgctgctggctatttctgcaaagccacttaacttttcttcctgattccatttttatttcttctctcctactctccatagcagcatgtggaatgcataaaatgcaaatccaagcaaaacctatcaatgtcttgtgaccacctttggactgaagttcagtggtaacttcctacctgggcattctgtgccacacaggaattgccctttactgaccatgctatatacaccagctttcctggctcttgatctacagaaggcctttcagtttctccctaaagcccctctcatatctgggccacatgctttaccatgctggaacgttcttttccctctctcttgttaattcccagaaaaagcaagagtcatgtcttgctccatttattgttactgcttttcccagcaccacactcagaagagcacctgctgtacttgtagatataagactctggaggcagttataagtggttttctacttgtggctctgcttttaatacattatgaataatgcttagttcagtacctaatgttaagttcagtaaaaaatcatgtaatctccaggaattattttatttattttgttttttaaataattttgtggccgggcgtggtggctcatgcctgtaatcccaacatcttgggaggcctcggcaggtggatcactaaggttaggagtttgagaccagcctggccaaaatggtgaaaccccattcctattaaaaatacaaaagttagcagagagtggtgacaggcgcctgtaatctcagctactcaggaggctgaggcaggagaattgctggaacccaggaggcagagattgccgtgagccgagatcacaccattccactttagcctgagcaacaacagcgagactccgtctcatataaaaaaaaaaaaaaagtgagcatataataggtgtatatatttatgtggtgtatgagatattttgatacaggcatgcaatgtgaaataagcatatcatggggaatggggtatccattccctcaagcatttatcttttaagttacaaactattcaattatacactttattttaaactgtacagttactattgactatagtcacactattgtgctgtcaaatagtaggtctttgtgctgtcaaatggtaggtcttattctttctaacaattttttgtacccattaactaccctcacctcccccgcaaccccccgacaggacccttcccagcctctggtagccatccttctactctctatctccatgagttcaattgttttgatttttagattcaacaaataagtgagaacatgcagtgtttatctttcgtgcctggcttatttcactgaacataatgatctccagttccatccatgttgttgcaaatgactggatctcattagtttttatggctgaatggtactccattgtgtatatgtaccacattttttaatccattcatctgttgatggacattgaggttgcttccaaatcttagctattgtaaacagtgctacaacaaacaaaggaccaggaattattttactacccaatttttgctaatttttataagcagtattttttggaaaatgaccacattttcaaggaattaatatgggatgttcctctcttgaaatgtagtctagagctttaacagaaaggtgtcatccttgatgacagaatagtcaacatgatggcaggatctgggcagagagagtttagaagtacatatgtcttggtattacatgggcaatcccttctccaccaacagataagctgtgtgtgacctgctgaatgtgtggagcagcactcaacctgttgaaggctttgatttctctctgtgctagagggtaataaatgaaaagaagatgagactttgaaacctctaaggcaggcttgtctttagtctgaattttcttttttctattaggaataagctgccacatgtaacaagtgaggactccctagagcttcagatacccttgcctgggaactactttgacctccttagagacatgagtagggtgttttgaggaccattctgctccacaaattccttttgtggcatctttctagagcactgggtcttactaatttaagtatattggctgggcgtggtggctcacacctgtaattcctgcactttgggaggctgaggtgggcagatcacctgaggtcaggagttcgagacaagcctggccaacatggtgaaaccccatctctacttaaaatacaaaaattagctaggcatggtgacggatacctgtaatcccagctactcgggaggctgaggcaagagaattgcttgaacccggagatggaagttgcagtgggccgagatcacgccattgcactccagcctgggtgacagagtgagactccatctcaaaaaataaaaaataaaaattaattaattaattaacaaacctattgactattgacttttctcccacccccaccccctcaccattatctctctaccacaatctccattctcccgaaattcttatgtcctggtaactgcccaggaacaggatggtctttactatattccagatttcagcaatttaatcacgtttatgtaaagtatgcctctattcaaagcagatttgataaggcttattaaaatacatatagtaaaaatgattataacaataatggtgattaaaaaaacagcagccagtgaagatgtacttggacagagaaaagaaggaaagaagaaacaatatgacactggggaaaatgttaataggttgcttttagcacattctaataatctgtgcactgattgtcatgaaacatataaactgaactttccagcagccaaggtaaataaataaatatagaatttcacgtggggatggaggagcttgccaggttgttctattgcaatagcctgtgaggtactaggtttacctctttttgcctaattcacagtaatcttttgctaagcaaatgccatttaaaagacatgaggactttcttgaaagggcaaataaaagaggatttggcagatattaaagtgctgtggctggtgattggacctctccagcttacacaccctaaagagtgcaatactatcaagaccaaggaaatgtttacattactatggagtttctggcttctctacgactttcagttttaatgtcctgttcagtaagtgtggaaaaaaataatgaaaggccatggcatttttataacaaaccataaagatggtatttttatcttaaatttcagatgagcaatgtcttgttcttcgttttattgaacatttgcaaattaatctcaaacagatcaaaatacagctaagaggaaaattttttaagtatagcttagaatttgaaagcaaattttcctaacatggctaaccagttcataatttgggagttctagattcatgatgtcatgaaattccagctaaccacagcattctcaaatatcaagtgtaagctaatttgacatgtgaaaatcaatttttttttccaaagttgagggttattctaaaggatagtattgcaaaatgtaaaactgaatatcttttctagtcaaggaaaatcttactttgtagactgggaatgaaagacacgtgcagcctgtttattccttcatacctgtagcataaaatacactggctgctgtctttagcagttacataaccaaacaaaagaaaaataggacaccaaatctttaggtcatctatatagcacattgactattataaccatctgattgaaaagtgtgaaaaaatataagtcagtttagaatcattctaaattatgtaatttgaaaaaatgaaatttgaactcttatcaaaacattttatgtgcattttattttgtttatttgcataaataaaaacaccaaaaatttttgatgcgtaattcaatgctgagatgatgtagaggaaggcaatacgtaatctatgcaaactgaaatgacaatttcaaaggatagcagaaaatccagtcaccaaagaggatttagagggctaaattttaatttggaatcttgacctgtgctaattaaaaggcaaaatgaactattgaatgcttttttctagttcaaaaactatttggttatgtatttgacacagatgaattttttataatttcattaataaggttatcttctctcaaattattgagaaatatgcttttaaaatgctattaattttgacgattttttccagttttcaattatatggattatcatctataaaagttaaattaacaagtatcttctcaatgcatttgatgtaaaatgttctttcttttccccaaatgttctctttttctatgagaaaataaaattattataacgatgcagggtatttggcagtgtagctctcgctgaaaataaacactaaatagtattgactgcatactgaaggctgaagagattgaaacttacaagtttaataaatccagacttggtgttatagtgtgtgtgtgtgtgtataaatatatatatatgtgtatatagatatatatatagatatatatatataggtatatatataggtatatatatgaatatatgtatgaatatatatgtgtatgtgtgtgtatatatatatatacatatatatattctttccagtatttaaacaatcaaaagcaaaatggtatatacgtacctacaatgatgacattacctatttgcatgaattgtaaaaaatatttgtttctctggaacctgatcctcaattatttcagaaatttaagggaggaaaatctgtttggaaggctttggaaaatttatttcattgttttttactattattttaggaagaagatcacttatttttggagtgccagcaccctctacttcagataggatacttttaaatgaagcgatgaaatcgtattttgttaaaacttgaaacaatagttatataacatattttgtaggttttactatgctttgccatttttatcttatgaactagttgacaatgtaactatctaatgacataaactgatacttctttctcaaaacataaaagcttctttctcccccatgggctgttaaaaattattatttttttatggtcacattaggattgtgtaactagtttctaatgggatttcatgtgtatattcttgaacttttaaaaattattttttaattgacaaataatatatattttaatttatttaaaaattgtgtatatacaacatgatgttttgaagtatatatacattgagaaatggctatatctatctaataacaaatgcattatgtcatatgattattttgggggtaacacaacacaattttcgatatgttgtgtttaggtagtaccctaaatgacgccttttttacttgttgattgtcttggtgaaatttgctgttccttctaggcctacctggaaagtccgacattaactctgctctatttaatcttctaatcatttaatttaaagtaaatagcaatgacgaaataatatttcatattgatgacagtatgaattacaaagatagttatttgaaaccacatatgtaatattacatattggaaaaacatatagggaattacaatcctggacaggtcaaataatattcatctgagtaaactgaagaataacaaaaataaagtagatctgatagatgtacatacaattctgctcttcaaataaaaaatataactgttttttcccatgtaggagtaaacttgtttgtttgtttttaaatcaatattctgttgagtagtaaagaaataacaatcagtaaaagaaaatgtaaaagagttatgcacactattttgtctggcactaatttaataatcctataatgataatagaagaaaaaattttaatggcaatataatgaatatttaggaataacctcttgagacaaatatacaaaatcttcaattaaaaaatacctagaaataacagctaacctaacaaatatataagctctgtttaaaaccttatttaaaagaaaatttatgtgtcaaacattttcactggtgcaaataaatattgaaagaaagaaacaaatattaagaaaaaataatgaaaaatttaaaaataaatagaacataataaagataaaattagaaatcaaattgtaaagcagactttagaatttataaagtcagtaaaataatcaatagctctagaatcactagttaatccaactaagaaaagaaaaataaattattaatatgcacaaataatcaagaaattaattgccaataaggatgaaattaaaagaatagaaagaaaatgcattttataactctaggcatagatatctgaaaatctatatgaaataaatacacttctctaaaaatataagttataaaaagtatttattagaaaacagaaaaattacagataatgtggaaaatataccttttatcgtatatctactagttgtatcaaaatgtaaagaaactgatccattttaaaactgattccaggcatggagaagaagcaaagcttcccattagtttgtataatgtcgccacatcagtagcaaagtcttataaagacagcacagagaaagaaaattgcagatcaattttactgaaatattaatcaattttactgcaatattaatgcaaaaatcctaaatgaaatactagcaaataatatacaatcatatactaaaagaatcactaatctttaaaaagtaagttcattcacactaattcaaatttgtttaatattaagaaatccatctatataactaaccattttaatcagttcattgacttgtaattatgttcatcttaatagatattaagtagatatttgaaaattggaaaactccattcaagaaacaaaacaaaacctgtataagaatatgtataccaaaggccgttgccacaattagtggcaatacccttgcaatctacctattaaaattggtggaattggggcgataagaaaaaggagaagtaggaaaagagagatggagaagaagagaaggaagagtcagaaaaaggaagagcaatagtaacagggtcctaaattttagaagtccttgcacaattgggacagccaatgccaattgtattttacaagaggtgaatctgtcattctttcttgttggtataattgaaaatgagactgtccaagagaaatatgtaaaaaaagaaaaatgctagaaataggtagagattcagtaaggtggaaacgtacgaacataaatttaaaatgtaatagcttagaaaccataatgggaatataagtgatttaattgtaagaaaaaatatataaaaaaccttagagagaaataataatgttgtataaactttagaggaattcaagtatacaattaagtaattaattaagaagatacattttagtattggatactattaagaagattcattctagtgtttaatattttatgtgttataaaatattatcttatataaatatactcatatggaaatatttattatccttagtttgtgactccgtaagggacatagcaaccagcattctgttaaatacatatgctttccacataactataactcatattaaaataatatatacagctgccaaaatattttctattttaaagtaattggtgtatctcaatatgaaacatcttctcttttaagcatttatgtatgtatagttattttagtaaatcagtacaatgcatattataatagaataacatatatgaaaagatcctggtgtcatcttgtcaatatgctttgtttcaattctaattcatgctcttgttgctttattgtcttgttgtcatggtcacacacaataaattacaataaagttgggcttctcgcccgcccgcccctcgcccgcgcgccggccctgcagagccggccgacctggctctcctccgtgacccggaccagcgggcggactgccctgaggaggccgggagcggagggctgggccagccagcgggcgggcgaagatgccgaacttctgcgctgcccccaactgcacgcgaagcgcacgcagtccgacctggccttcttcaggttcccgcgggacccggccagatgccaggagtgggtggagaattgtaggagagctgacttagaagataaaacacctgatcggctgggcgcgttgactcacgcctgtaatcccagcactttgggaggccgaggaggtcagcagatcgagaccatcctggctaacacggtgaaaccccgtctctactaaaaatacaaaaattagccgggagcggtggcgggcgcctgtagtcccagctactcgggaggctgaggcaggagaatggcgtgaacccgggaggcggagcttgcagtgagccgagatcgcgccactgcactccagcctgggcgacagcgagactccatctcaaaaacaaaaacaaaaacctgatcagctaaataaacattatcgattatgtgccaaacatgagacctctatgatctgtagaactagtccttataggacagttcttcgagataatgcaataccaacaatatttgatcttacagtcatttgaacaaaccacgtaagtagacacagaaaacgaataaaagaactgagtgaagacgaaatcaggactgaaacagaaaaacattgatgaaacttctgagcaggaacaaaaacataaaccaacaatagcaatgctcagaaccccagtgaagaagagggtgaagggcaagatgaggacattttacctctatcccttgaagagaaggaaaacaaagaatacctaaaatctctatttgaattattgattctgatgggaaagcaaaatatacctctggatggacaggaggccgaagaaatcccagaaggtctctttaccctagataactttcaagcactgctggagtgccagataaattctggtgaagaggttctgagaaagcgctttgagacaacagcagttaacacgttgttttcttcaaaaacacagcagaggcagatggtagagatctgtgagagctgtattcgagaagaaactctcagggaagagagagaatcacacttcttttccattatcactgacgatgtagtggacatagcaggggaagagcacctaactgtgttggtggggtttgttgatgaatctcatagcctaagagaggaatttataggttttctgccttatgaagctgatgcagaaattttggctgtgaaatttcacactatgataactgagaagtggggattaaatatgaagcattgtcgtggtcaggcttacattgtgtctagtggattttcttccaaaatgaaagttgttgcttctagacttttagaaaaatatccccaagctatctacacactctgaacttcctgtgccttaaatatgtggttggcaaaatcagtacctgttatgggagtatctgttgcattaggaacaattgaagaagtttgttcttttttcccttgatcacaactgcttttagaacttgacgatgtaatttctgttctttttcacaacggttaagaaaggggtaaagaactgaaggaaatctgccattttcagtggacacgcaggcatgatgcttttgaaattttggtggaactcctgcaagcacttgttttaggttcagatggtataaatagtgacacaaatattagatggagtaactgtgtagctggcagagcatttatactctgcagtgcagtaacagattttgatttcattgttactattgttgttcttaaaaatgtcctatcttttacaagagcctttggggaaaatctccaggggcaaacctctgatgtcttatttgcagctggtagcttgactgtagtactgcatttactcaacgaagtgatggaaaatattgaagtttatcatgaattttggtttgaggaagccacaaatttggtaaccaaacttgatattcaaatgaaactccctggaaaataccacagtgttcaccaaggtaacttggaatctcagctagcctctgagagttactataaagaaacactaagtgtcccaacagtggagcacattattcaggaacttaaagatatattcttagaacagcacctcaaagctcttaaatgcttatctctggtaccctcagtcatgggacaactcaaattcaatacaccggaggaacaccatgctgacatgtgtagaagtgacttacccaatactgacacgctctcagccaagcttcactgttggagaatcaaatagaaacacaggaggaaagatatagagcttccatccaccatctatgaagccctccacctgcctgacatcaagttttttcctaatgtgtatgcattgatgaaggtcctgtgtattcttcctgtgatgacggttgagaatgagtggtatgaaaatggacgaaagcgtcttaaagcatatttaaggaacactttgacagaccaaagttcgagtaacttggctttgcttaacataaattgtgacataaaacacaacctggatttaatggcggacacacacgttaaaccctatacaagtaagtcagagcttcccacagataattccaaaaccatcgaaaatacctaggagagttttaaaaataggccttcttatatttgatattttaaagaaaagccatatggtgtatgtaaacctcttaatcactaaatgtctttgcctatagaactccattgaatacattagccattgataatgtacctgtttaaatggcccctgtttgaactctcaggctttgaaaacctacctgttcttccagaagagaacattgaaagtgccatgtttccttctgcgtgtactctgctgatggcactctggaattgttttagttaggtcattttagacatagcatttattatcactgtggatctctacttgttgggtgttacaaattctttgaagaagtatgttttgaagaggtgcgggaggaaggaatacattttataaaatgttatagtgacacccacagttgacctttgactaataggagttttaagtatgttaaaaatctctcctggacagttacaagaaattaccggagaaaagcttgtgagctcgccaaacaaggatttcagtgcagattttgtctttctctaacttaaaggagcaaatgacagttaaaatttgaatggaagagcctggcgttgttctacatctcattgttgctgtttacattcctttgtggagcctacatcttcctaagctttttagccggtatatgttgaacacttctgtttcatggttaagacggaatcagaggccatgggtactgacaactgacttgtctgttttctttctgtctttttccatgactcttacctactgcctcatcttgatttataagcaaaacctggaaaacctacaaaaataaggattgtggtttatctagaaaactatggaaaacattgctgttatttttgatgaagaaaatccattttgtatagtttatttcaatcaaaacaaaatgtgaattttgtttaaaaatggaaaaaagaaacttaatcattttattcactaaaggaaaataatttacgagcttctagaaattttactatcatgtaattaactcatgtcagtcttttgatacactatttttttagtacattctaatactatagtggtaaagtacataaatggaaatttatgtatattagggtgaaacaagtaaacagagggaaataatatataaaacatgttatatagctactacttgggaatgtatgcaaacatctacctatatctttttatatttaattactaataagcatcttgcatatgataaactgttagaattatttcttgtaccaatctatctcttaaaagttttctagataagagaataagagaaaattgtgcaacatattttctaactttgctgaaattattttgagttaaaggttaatgacatgtaaggaaaaaattatgatgaaataagaggaaaatataattaaatgatagtaatgtgctaccagttgtttaacttccacctcttttttcctttaggaaaaagctagcacaaattttgttaatcacaggccaacacattatccttctctgcggaagtttcaaaggtgcggggaggtggaaaacttaagttgaccctttcattgcctctgaaagtaatttctataatcttaacctcctgaattcagtctctggcattttatgataatgttaacacttagggaaatcatgttttattcatatttaatgatgattaatatgtcgctgctatataatcaagataaaatagactagtttccaaaagtgttcttttttataacaaagaaaacagaaattactaaggattcaatgaggggtttaaaacaactttaaattcaacaaaagaattattttaaaactttcactgatttttttaaaaatctgaactttgagaatacttagaaaaacaaaatttcatttgtttcaaaagaagaaaatcaatccaatagaaaaatacaataatcattttctaaccactgtatatcaaacagttgtgcttattgctttaagcttttacagacccatttctgtgccatcaagctaatatgggttcatactactctggacaagctggaaaaaaaatgtgtgtatatatatgtgtgtgtgtgtgtgtatatatatatatatatatatatataatttacactatatagatatgaggcaatatgttacaataacataagtatgggacaatctggaaaatatatccctttgagtcctcaagagttctatgatttggtcaaatagatgttattcctaagctcctagacatgttttactaattatttacacaagagctcaaaattatttgatttctgaagaaaaattataaaatatttttacttgatcataaaataatttagcaagtactgttaggaagaaaagtattttttggctggtcatggtggcacatgcctgtaatccagcattttgggaggccaagacccgcagatcgcttgagccaggagttggagagcagactgggaaacttgaggaatcccgcctctacaaaaactgcaaaaattagccgggcacagtagcatacacgtgtagtctcagctcttcaggaagctgaggtaggaaagtcacttaaacccagaagcagaggctgcagtaagccgagactgtgccactgcactccagcttgggcgacaccaggagaccctgtctccaaaaaaaaaaaaagaaagaaaaagaagaagaaagggatttcttttgtgtgctaaattgcaattggcttaggaaaaattatgttatgtgtacccttaaaaacttttttcttttttttttataaagtcttttatttattttattttatttttattatttttttattatactttaagttttagggtacatgtgcacattgtgcaggttagttacatatgtatacatgtgccatgctggtgcgctgcacccactaactcgtcatctagcattaggtatatctcccaatgctatccctcccccctccccccaccccacaacagtccccagagtgtgatattccccttcctgtgtccatgtgatctcattgttcaattcccacctatgagtgagaatatgcggtgtttggttttttgttcttgcaatagtttactgagaatgatgatttccaatttcatccatgtccctacaaaggacatgaactcatcattttttatggctgcatagtattccatggtgtatatgtgccacattttcttaatccagtctatcattgttggacatttgggttggttccaagtctttgctattgtgaataatgccgcaataaacatacgtgtgcatgtgtctttatagcagcatgatttataatcctttgggtatatacccagtaatgggatggctgggtcaaatggtatttccagttctagatccctgaggaatcgccacactgacttccacaatggtttaactagtttacagtcccaccaacagtgtaaaagtgttcatatttctccacatcctctctagcacctgttgtttcctgactttttaatgattgccattctaactggtgtgagatggcattgcattgcggttttgatttgcatttcttgatggccagtgatggtgagcattttttcatgtgttttttggctgcataaatgtcttcttttgagaagtgtctgttcatgtccttcgcccactttttgatggggttgtttggtttattcttgtaaatttgtttgagttcattgtagattctggatattagccctttgtcagatgagtaggttgtgaaaattttctcccattttgtaggttgcctgttcactctgatggtagtttcttttgctgtgcagaagctctttagtttaattagatcacatttgtcaattttgtcttttgttgccattgcttttggtgttttagacatgaagtccttgcccatgcctatgtcctgaatggtaatgcctaggttttcttctagggtttttatggttttaggtctaacgtttaagtctttaatccatcttgaattgatttttgtataaggtgtaaggaagggatccagtttcagctttctacatatggctagccagttttcccagcaccatttattaaatagggaatcctttccccattgcttgtttttctcaggtttgtcaaagatcagatagttgtagatatgaggcgttatttctgagggctctgttctgttccattgatctatatctctgttttggtaccagtaccatgctgttttggttactgtagccttgtagtatagtttgaagtcaggtagcgtgatgcctccagctttgttcttttggcttaggattgacttggtgatgcgggctcttttttggttccatatgaactttaaagtagttttttccaattctgtgaagaaaggcattggtagcttgatggggatggcattgaatctgtaaattatcttgggcagtatggccattttcacgatattgattcttcctacccatgagcatggaatgttcttccatttgtttgtatcctcttttatttccttgagcagtggtttgtagttctccttgaagaggtccttcacatcccttgtaagttggattcctaggtattttattctctttgaagcaattgtgaatgggagtttactcatgatttggctctctgtttgtctgttgttggtgtataagaaagcttgtgatttttgtacattgattttgtatcctgagattttgctgaagttgcttatcagcttaaggagattttgggctgagacaatggggttttctagatatacaatcatgtcgtctgcaaacagggacaatttgacttcctcttctcctaattgaataccctttatttccttctcctgcctaattgccctggccaaaattgacaccctaacatcacaattaaaagaactagaaaagcaagagcaaacacattcaaaagctagcagaaggcaagaaataactaaaatcagaacagaactgaaggaaatagagacacaaaaaacccttcaaaaaattaatccaggagctggttttttgaaaggatcaacaaaattgatggaccgctagcaagactaataaagaaaaaaagagagaagaatcaaatagatgcaataaaaaatgataaaggggatgtcaccaccgatcccacagaaatacaaactaccatcagagaatactacaaacacctctaggcaaataaactagaaaatctagaagaaatggataaattcctcgacacatacactctcccaagactaaaccaggaagaagttgaatctctgaatagaccaataacaggagctgaaattgtggcaataatcaatagcttaccaaccaaaaagagtccaggaccagaaggattcacagccgaattctaccagaggtacaaggaggaactggtaccattccttctgaaactactccaatcaatagaaaaagagggaatcctccctaactcattttatgaggccagcatcattctgataccaaagccaggcagagacacaacaaaaaaagagaattttagaccaatatccttgatgaacattgatgcaaaaatcctcaataaaatactggcaaaacgaatccagcagcacatcaaaaagcttatccaccattatcaagtgggcttcatccctgggatgcaaggctggttcaatatacgcaaatcaataaatgtaatccagcatataaacagagccaaagacaaaagccacatgattatttcaatagatgcagaaaaagcctttgacaaaattcaacaactcttcatgctaaaatctctcaataaattaggtattgatgggacgtatttcaaaataataagagctatctatgacaaacccacagccaatatcatactgaatgggcaaaaactggaagcattccctttgaaaactggcacaagacagggatgccttctctcaccactcctattcaacatagtgttggaagttctggccagggcaaaaactttttttcttttgagacagagtcttattctgtcacccaggtcacacaggctggagtgcggtgacgagatctcggctcactgcaacctccgcctcccaggtttaagtgattctcatgcctcagcctcctaagtagctggaattacaggcatccaccaccacgcccagctaatttttgtatttttagtagagatgaggttttgccatgttggccaggctggtctcgaactcctgacctcaagtgatttgcctgcctcagcctcccaaagtgctgggatttcaagtgtgagtcaccgcacctggccaaaactgcttttttgtatccatccacttcaattcccctttcaaaccctttaatgccatttaattatgttgcttcccggaggaatatatttccttctgtcctatatcagtgatgtaccttagcttaagatagaaattcattagtgtagacatggcttaagtagtctctaataataatttttaacagattatctcatcatttctcatatctacaaaaagtctgtgaaaaatatctttattggatcaataaagatcccatttagcttaatgtatggtttcaagtaaatgatgtgctactcactgtaaaaatttctcacttaaaaatattggattattctttctgttaagtttattgtcctccaggctcatccatgttggagcaaatggcaagatcctattctttgtgagggttaaataatatttgattgcatatatgtaccacaaaatgatctcacttctatgtggagttttaaaaagtattcaactatacaaagatagagaacaaaacagcagttatcagtggcaggggatagggaaagaaatggaaagatataagtcaagagataaagtagcagatatacaggaagagcaagtctagagatctaatacacaacatgagaactataggcaatatacctgtaatgtatatgggattcatgctaaatgagtagattttagctgcttttgccacacactcaaaaaaaggtaactgaaataatgcaaagtgttcatttgctcacagtactatctatatgcatttttactgtctatatgcaccttataatatcatgttgtataccttaattatacaaaatataatttttatgaaaatatattggattatttttgagagaatgaatctttacaaatacacataattgtcattttagctttttaattataaatacacatacacacaagcatgcacttagagaatgttctcattttctgaactacagatggttctttagtaaatgtaacctaggtgattcaataataacatgattttaaataactataagcctcagttattccttgttctcatttaattcagtttccatgtctcccaccattagcctttgtaatagtttaatagtgcattctatctctctccttctctttcaaacttattttgtaatgactcaaactttagaggacttcttgagaatggatcaatgtctgaaaaacttgacaattagatagcattaacattgacacaaaagcttaaacttgtttgtaatattcaattattttgtctttttatcattataaccttgcttttgtcaaaactgtaaatgatgacctgtttctacagtttgagtaaaaactgatacctttaaaaatatgcataatagccattttagcttttttattataaatacacatacacacacatgcacttagagagcgtcctcattttctgaactacaaatagttatttagcaaatttaacctaggttattcaataataatatgatttaaaataacttcaggcctcagttattccttgccctcatttaattcagcttccatgtcattttggcttacttttcacagaaaatatgcatatgcataaacgtttgcagaatcaaacataatatggacattctattgctacttttttagtaacactaaaacatccatatataggcatcttttcatatacctgcccactgagtctatacttcaaaaaataaaatatatagcaaaaaaaagaaaattatttctctggttgagatcttcagggttctagcattttttacttcattttacccagtcccccttttcccagtttgtgtggcatggcaaatagtataaaaagggaggaaaaagcaaatatcaaaaatgcaatgtgctacacacattgaaaacaatactagcagatattgagaaaattttttctttcaaattccaatacgtataaacaaatgtaacacaagtaagtttgtacacactgccctgtaaattacattacttatcctctggtcagttctcttacagattctcaccttagaaaaattcacaattcaaaaacagttctccagaatgaggttttttgtttgtttgtttgtttgttttgttttgttttgttttgtttttttgagacagagttttgctcttgttgcccatggctcactgcaacctccacctcccgggttcaagcaattttcctgtcttggcctcctgagtgcctgggattccaggcatgcaccaccacacccagctaattttgtatttttagtagagacggggtttctccatgttggtgaggttggtctcaaactcctgacctcaggtgatctgcccgcctcggcctcccaaagtcctgggattacaggtgtgagccgccacacccagcctagctcttttttaacctttgggagaaggatacgtctttgccttactcttaaaacaaatgcaacacctatcttccatggctgtggttcttttgaagttctatttctcactgcagatgacactgtttacctggaaatagcttctttttagactgccaactctgtcttaacttcagccccaatcttcacttcatcactctgacatggatcagtattaagaaaaattctgaagaattcaaggtttgatttagctccttgtttctatttcccactgaatcttgaattactggaagtaaatttattaagcactttcacattctgtccatgctcccatttcaatcaaaatttacgttgactttccccattcacccagagttctatttcaagcttgccaaagaaatatttacaatttgatcaactgaatcgcattaatatgcaaatatgacagtgttcaccttaagatcttccttcccccaaatagcttcagtgagatgtagccattggaaagcaatgcctcctttacattgcctatttgaccccaccatagtaggctgacccctttaacaggcctaagccatattacacaagttctgacctacctttcattggcaagggacagatcaggtatctaattttatcatttcaatgtatgcatattcatattctgaaacttataattttttacttgttctcacttagagcacaagtaagcgagaatctctattgctgagttatacattagaattttcaaagcgagcagtaaataaaatgaaagacaattgtatttctaccaagagatactttatggagtattaacatatcacatcttcaggtacaagttgaaattatctcaggcctgaggtctgctcaaattagtatgttgttagtaatttggagcaattatatatgtaatgctctgccattaatacattgaatccacaattatgcatgttctgtaaatgatacatctataaaaacaataaaaacaaatttggctttaccagataccagcaaaacttttatcacattgtgggcctttggaaatatttctgccatcaagcatatttaagatgatttccaaggtcttgcaaaattgactacatatgttgaagaccgaataaaaatgaaggatgctctattagtgtcagttttcttaatagtagtatagattattaagctccactaggatcttacacatgtatctttacattattattattattataatatatattttttctttcttgagacagagtctcactctgtcgccctggagtgcagtggtgcaatcttggctcattgcaccttccacctcccaggctcaagcgattctcatgccttggccttctgagtagctgggattacaggcatgcaccactatgcctgactagttgtttttttttgttttgttttgttttggagacggagtctctctctgtcgcccaggccagagtgtagtggcatgatctcagctcaccgaaacctctgtctcctgagttcaagtgattctcctgcctcagcctcctgagtagctgggactacaggcgcccgccaccacgccagcctaattttttgtagttttagtagagccagggtttcaccatgttggccaggctggtctcaaactcctgacctgaggtgatctgcccgcctcggcctcccaaagtgcagggattacaggcatgagcaactgtgcgcagcccattatttggcaaaatagttttttgaaaatactcttttgttataaggctatgaacaaagtaaatatcttctaaggacttttttttttgttaattccaagcttgtagtcacatacagtttaaagtgttcttatttttttaaatctttatacaaatgattattccatgtctttcattcacatcttcatctggcagacacttccttcgttggtgaagttaagataaaataaatttttattacacttggcagaccttgggataaggtggcgtatagtgagataagctgcttattaggagaaggtaggcagatattagattataaattcatagagtaatttattatgtaaatttaaaaattaaatgtaacaaatatgacttttattgcacaatcattttacaataagtatttgtttattcctctgaaatttattttatcttaactttgtaataatctggaactaaacatcaggagtacagaaaaaaatacttacttgttcctgaggaatttaaaggctaataatagaaggaagagtcaatttaaacaggtgaaagtaatataatgtggctcaaaggaatcttgaaaatgttttacagcagtccaaaagagaataattggctctctttgaataatatgcttaagcttattatttatatgcttatatgaaaataaatatattaatactgataaataagaacagctatattaatttaatgtttattgtgtactagggaatgtgctgttttgcacagttttaagttgggggatgctcttcattgtgtggaattagaaacagttttcaagaagttagataatagtttcaaagtctcacaacttgggaaaaatgcgattcaaattcaggtattttgttacatttaactgtgtttaaatttaaaacatggaaagatggtactaggggagaactctgttgtggagagagtgtcagtgtgagtcaggaaactcgaagttttagccccaactatgccattttttttttggtttttttttggccttatgactttaagtcacaatttacactgagtttgataaattagatataattatactcacatcctgtatcatggattttttgtagcattggtagatgaaaccatgtttaagcaagaaagcactatagaaattaaggtattttacaactccagctaatatcactctccaatgattttgtttgttttcaatttactggtcatactatgctttgttaaatgctactatcaggtatgtctttctctaccttgccaactgacgcctattcatccttcaaaacctcatgaacttttaagatcctctgaaatgcctctttcattctcatgttgtatgtgctcattgtacttgatacaagaggagaattatagcacgtaaccactccgtgttggtgtgattgctcttggtctatcagatctgccactagactgtgagatgattactttatccccagttcctggaaaatactgaatacttcatgaattggtgtagacataaaaattaagatttcaaaataaaatatattggttcaaatatatgcattcttatggttaacttggttaggcaagaaccttgtattacagtctgtaaacagtgagaatgcctttcaaaaggagaaaatggactttgattattttcaaaaggatattagatttataatactcaagaaaaaaagacaattcagaaggaagaataaaattatttttgctctgaaaaaagagagaatgaattaacaattctagtaacagggttcatcatcatttatttttaagtttgctatttgaaaacttttttaacttaattgtttagtgtggattccctacctcatcccccaaaatttcatatttcactattctttccacagcattagtttatgctcttagattttcttggataactcagtatatatctctttctgttaaatttaaaacatatttattatcaacattgcataccgtatattggaaggcaaaagtattttcccattatgtaatgttatttataaaccaaactgaggaaaaccttcacagcctcagtagagaggagataatagtgtttttaaattcattctttctgcatattttatcataaatcattttaggacacacctttttaatgcacagatgctcttaattagatcagcattgtcatagaaactatgctctctttttgactattgccaacagcagcaaaacatccatttccttataattgattctcaagtttatttaaaacgttctatatgaggcatagcctattgaaatgactcaccatgtttatgggaatactggaggataagagttatttttgaatgattttatcatattaaatgtagaatagaaatataaactttgaaaaatatgtaataataatttttactatatggtttcaataacttttcaattttaaaagtattgctctttataacgatatgagtagttaaatccaaaaacaacactgggagagcctccatgaactaaatattggactgggctttagaaatatacaaataaatgaaaacttacctgttttctcaggaacatcccgaatcagatcagtaagtatctgtattgtcacattacttcacagaagttcaaaagatccaggatacaggtactctcttctaacttatttaagaacaatgagaacacatggacacaggaaggggaacatcacacaccggggcctgttgtggggtggggggaggggggagggatagtattaggaggtatacctaatgttaaatgatgagttaatgggtgcagcacaccaacatggcacatgtatacatatgtaactaacctgcacgttgtgcacgtgtaccctagaacttaaagtataataaataaataaaaaaaagaagtcaaaaaaaaaaaaaagaaaattctcatttcaccattcttcaggcaaagaaattgcaattcctattgcaaaggtaaattcatttatacacttaacaaatatttgggtttccagtaaatgaaaacacaaaaatgggttaaggggctattaattattttcaatgcttccactctaataaataacaatggctaacagttgctataaaatagtgttttaacataccaagaaccataaaaaaagtgtttgcaaaatgaatagatcatatgagagagtttcaaaaatgttttttcaaaaatgtttccccaaaatatattttcttcttttacactcctctcttttagagaaaatcttctctttgaagccagagcagtggattttacaacctgtatatttcacttctttctatcttttgtgcactaaattacctcctgttactttcaagtctgttaaacagattgaaaacaactgctttaaaggaaaggccatcacctttgaagcctgacatggctggattacaatcttcacttttattttctagatgagtgagccaattacataactttcttaatcctcagtattcacatctgtaaaatgaggtgataatacctggtttaccctggattaaattatgcagtgcacttatagcacctagtaaaatgtcccagcactttaatggctgcccttttatagcatgattttcaagtgggacattaaaaagggattaataaagtaattataagtacaattggactagatatggctggatagggatacaatgaattgtaagtgccatggtgaaaagcgtgagaaaagagccataaagtgaaatctccctgctctagtttgattggaaaagaaaagctgtgctttcaagtgagggaaataagcctggagggcatagtttggaacattcttgtgatgggccttaaatgccaggctgagaagtgacacttaccttgctgggcaattgaaagctattgaacattttcagacacaggagtaacatgatcataattgtcctttaagattaaaattgggttagcctatgaatgaaagagaatggagagaggctggaggctgagaggcaatttaggagatgattactcaagtcaaagttaataagaatctgtcttagactggggaaatatcagagaaaaataggaagttgatagtacatgaatgattagaaggatttaatagatcgttatttgtggggaacaaaaaaaaggaatggttttggggggaaaaggtgagaagtaggagagagtttgggttagaaaataacaggatttgggactccatatttaaacagtgatttgcatttttttttctgagtattttcgtgtcttttcctgggcctaggataataatatcaaggaaagatcattgtctcaatgtatcggagtgcataaaagctaagaagataagtgacttactcaccatccctcagctaataacagactttaaatttctggctcctacattacaactgtattcactactctgacttggatgttgacaggacagggaacacctcagagggaaatgcccagccttctcctgatatttaagactggtattttgaacttgggagaggtaaattgttatatgagtcatcaaaattgttatatgagtcatcaagatggaatccacagtcaaggataaaattgtcaaagggatgagtactaaaagagaagcagtttggtgtggagcccttgaggaacaggtgctttctgaaagcaagcagaggagaaacaaacacaaacaatttaatctgaatgatcaaaagtgatttcaagtaaggcagaaatgtgtaggttaaggaagggggatctttaaaaaagaaggaaattagtatagagaggtttaatgaatgaagcttgaaaaagaccacttgaatagaaaactcctgaagactttaaagagaatgtttttattatactaatgggagataaaagcaaaattaaggtcatattgtaatgaaatctagagacatagaatacttaccctgtgagttatagtaatatttatttgtattcgagtttctgttttaaggcaacagacatttgtatgatttttatgttataaagaaagaaacaatgtcactgttgaaatctcagaaacactaacaaaaataacaaatttcagtttttttctttttcccaaagaaatacctggaactcttaaggatatttatagacatgtaattcagtgtaaactctatttcatattgtaatatttatgatttattatacttttctgccaaataatttcatatttactcttccttaggatatatgtccatatcacagaatgtggtaattaaatatgaatgttaaattggtttactgattttcagatttgcccacacaagtgagcaagaattcagtgactgaaatcttgctttgtaagctcagaaactcaattttattacattgtctactgttggtaaaattgattatataaggtcaacgctataagggttgagaccatattttcttcaactgtgaatctagcacaaggtcttgtacatagcaagtgttcataaatgaattgataaataaagaaaggcatagaatgtatactaacttataatgtagtatacaaggtaataatttatttctaaaactactctttataaatttcaaatgccagttactttcatctgccaagttactcaataagagtaatttgtttaaaacattttcttctgtgtgtgttagtctgtttaggaattctgattaaaatttagaaagtaagcaagtatagtttaggtagatttggacgttctttgacttaataatttataaattttttcttagggtgggcttctcttgcattattggtatctgtatcattctaaagatgaataaacagacttaggaaggttcaatagcatggattaaattacataagtaatatgaaatgtagatttagaatgccaaatacatgattcccatgaggcattcatgcacttgccaaaaaatgccctggatgggtttaattacagataacaaatgaccaagatgaaaattgataaccagggtcatatcttgatatcagctaaattagaaccccaagacaagttctgtcattactgaaaattaaaatttcaaattataaacattaagatatgaaccatctgagcctgaatgtgattatctaggctttcaataaagcaagattatgtatttgccctgttcttagattttgtgcttgttttcatggtgttttcaaatttcaaccagtagtttcaaccacatgtttcaaaccttgattatatatgaacatactatactgatccttttacattaaaattaaagatgaacaaattgaatgtataatgtcagttaataaaactacataggtttatttttgtctttacagagtaaaattttagtcattcacttatttatccttatacaggtaccttccaaaagaatagctcatagatattttattttcggaatgaaaggcaattacattgcttgggaattacatgaagaaactagtgctttggatttcaaattttttaaaaaatatattcagtcagtgagatagtcaacaaagcgagagttagagtattggtgtacatgtcctctagggaatattgaataaaaattataagaaaaacaacttgaaaagatacccataattgaaaccaggaaaataattaattaccctaaattgtaacagagaactaattggggacaatttattaaatgagaaaggaagaaaattgtaatgatagtttgaaacctgagtggggaggatgttgacggatcaagagtaaattaattgaaacaatattaaccaagatatttttttcttctctatgtgtcaataaataatgatttttcctttactttttaaatttaatttataatttagggatggacactgatttaatacaccaattaaatgagcaacatatagactcttatcacagtatggtttaaatacactatactatacaaaaaaatctcaaattcctttcgtccaatttgagatatacaatgccttgtttttctgaataaaacttctggtaatttgtatgccagttatcaaacaggtacataaagtttaaaaacagcttttgtttcaaaggacatctgtgttatggctagaatagacatcgaacatttagtaaacaatgctataaaatataaactaggcctttaaaggataaagggttcttttgtgtcttaccaatttctgtaataaaatgtatcagaaagcaatagctaaaagaaaaccttttaatgcatttcagatgtgtcatatgtagttataacatatattaatgattttgaagaaattaaagtcaatgaattatataactatccttgtagtaaaagcataagatggaattgacttaactctatacttgtaaccatacttaatgcaggtttattattagataattcggatatgaccaaaaatgatattataatcagttattgttttagaactacactttgaaatgaagctcataggcaatcaattttacatttagaacttataatttgacagaattctaactgaggaattaaacctcctcaaatatttggtaaactatttgcatagttacctaaattttgtatgaaatagataatttttttcaaaattcctttaaaaccaaccctgcctttctcattctctacagatttcttttcttattttcctgaaaaggttgaagttctttgatgagagatttcttcatttcctttgtattttaagatcactctatagcaacctttatcaatctcttttcctttttcttatctttcattgaacaatcaaaacctttccccaaatttcctcttttggctccttctttccccacctcatgctgccatctaaacctttggataatttattttcactctcagttgctgtacaaacacgatcatcttctgtcactcctgaattcagtggttgaagacagacctacacaccactccacaggaccacctcactcatcacagtcaccaaagacatctgtggttctaaatttcatggtctttatcttacaatacttgacaaacttttctaataatgtagatatgtacacatgcatcacattactgttcctgttcagatgtaggttaaaaagtcctgttgtaagagaaaaacttttttgaatacttgattttgattgaaattttatatataagataccattatttcctctcaattgttggattatcagtggatgatccaggaagacatttcttcccccagcatcctctgtacagtaggtgggtatgcatacataggtgtggggagttttattttaactcagtaacatccttaaatagtcttgaattgttctacacttgtgttctgtgaaagaatactgctttagttttttccttccaatttttctggcctctcttttagtcttccttatgggcttctgatccacttcatttcaagtttatatatatgtatatatatatatatgagatagttatttgttttatatatatatatatataaacttgaagtggatcagaagcccataaagaaatatatatatatacacattaattatatatattatatactgcatatagtatatataatatacataattatatatatttatatactgatgataattatatatttatatataacaaatcccttaatttttcaagtgttttaaaaaacaattttatacttaaaccagccttgaagataagcacaaaatttaccagtctacattgtttttgaaaccatggcaactctagcacccactctgcgtatagcactattctaggtagaatactagggaatcctaaccttagaaacatgatttcactttctggaattgcattatttccgtttacagagattaaaaataattagaaccaccatgcttactacttacttactatctgccccagccccttctgattcaaaggaagtctcatttctgccaaattcttcttctcattttactacttcctggtgaatttcatctaatttagtcatttcaatgaggctctgatatggactgagaatgtgatattttgtgttcccataaaaatttatgtgttgaaagttcatttgctgtgatggtattagaaggtgaagcctttgggaactgattaggtcatgaaggtggtgccctcataatagaattagtgcttgtataaagggctaaatataagttctcaccttccacgacatgaggatacagtgaaaaaagtccatcttgtgaattaggaagtgagtcttcaccacacactaactctgtgagcaccttgttcttggactttgcagctcacagaaccgtgagaaataaatgtatgctatttataagccaccaaatttatgttatgctgttgtaacagactaaatggattaagacagcatccgtgtactgattacattaaacctctatgttgtagagaggtaaactcttaacttttaattctctagctttcagctgcagctttgtgtttttagtttcccaatggaaatctatgctattctatataaagaaatatttcacactcaatatgtcctaaatcaaactcatttatgctgccccaaactgattctacctcttgtattgtctctgaatgaatagtgacacctttcactctatctttattaatcagatactaaatttcttaatgtttgttctttaatatctggccaatcttttaccttctctccacccctacttctgctgctttgttgcaggctttatttgtctctcacctagatgacttcaaaagcctcctgaatgttctccctgcctcaaagtttattttcctctacatgtagtcttcatgttatagacagaatagtctttagattgcaattacaattatttgtattgtcatggagtaaaatccagacaataaaatctttagcatggcatacaaaatcatttgcaacatggcttctgtccattttctgtcacgtcagaaccacactttgtgttgttttctgagctccctgaactcttccccataggtcgtgatctctcttgaacctgagacttttcacatgtggctctctcagatattaatcatcttcattctccattttctacctctagtattctatttctccttttcaatatttagcttaaaatccaagaaatatttcttgatctttgtaggctgacctagatgtttgttctactgcttctgttcatcatctaatggtaattccttgtatattggtttgtgttctcaccttcagtgatcagttctgagatcacgtttttcacctcccaaataaagattaaaaaaactacctcacacaaatgttttaaataagaacgcatatatagtatactttgcacagtgtttgaaaaatattttttctaacattaggctcaggatctctgcttctggtggcatctcattaaggtttctctcaaattctgaccttttaataatcccatttatagctcttgatttccagctcttcataatgactgcttctttgctgttagtcccaaaatattttctgatttcttccattcccaaatgtctaagtcaacccagcaatcttcctaacttaccattctttgttagtagctcaagttgctttaataaaatatgatatactggtggcttaaacaacagacatttgtttctcacagtttcagaggctgaaaagtttaagatcaaggtgctggcagattcaattcttgctgagggtcatcttctggcttgcagaaggccattttcttttcaccatattctcgcatgacagagggagaaaactcttgtgtctcttctgtttctaaaagcataaattccatcatggatgatcgaccttcatgatctcattgcaacctaattgccttttaacaatctcaccttccaataccattgctttggatgttagggattcaatatatgaatttgggggaacacaaacattgattcataacacatctaatctgtgtcatgaccttaaaaaccttaatatattaagtctatgcccacaggagaacttatttgtcacacattcattttaacctccttgtaatatactttgcatccttacttctcatcctaggttctctgcagaatctattggttcttttgcagttaatgcctttaaccattcagtattatttaataacttttgcaggaacttgtattttgtaccattcttctgagttgtgtcctaggcatcttcctgggtttctttctaaggttgaccttcctactcccccttgctaaatctcttctgcttttctctcttcagtctgccccttaattccaaatatagtgaaaatggaaaatcatttcttttcctagactctctctctctccaaggtgttggactgaattatcacatgtccacctgaaggacctccaggactccaaatttggcatggctaaagttgatgtcaaattcttcctccaacaactagatccaatttataaattcccttactagtttggtgatcatagtcaagttactcagcctcccagtgcctctgtctcctcaactgtaaaatgggaattaaaaagtatctaatttcaaaggctgctgtgcaaattaaagaagtcactttatgtgatatatgtgaactggtaccctggaaatagaacagatggtgatggtggtatgtgcctgtttgttatttttagcattccttttttcttttaaagcttaacactttttatttgatcactggcttcaatatttagttctttttcacctcagtcttctttattttattatctgccaaaatcttagttctggtgcttttattctgcatttcatattctatttctattaatgctgttaacttgtctctttgcttttatcttctaatttttaaccaggacaagtctaacttatctattttatgtttcttatacattcaatacactgattttaagttgagtatacagttgctgtcttgctaatgtattgcttttgcatttttttgtataattaaataaatatttcttggtttccatttttttctaccaagtgttagtttcactgaaatcacctccttgcccccatacttgctacttttgttaagcacaaatgtgttactttaatgtcaacgcttaacataaaataagcacaagaagaaatgttggcaatacttattacagcctccattacacattggttgttatgtatatgtaatggaaaaaataataacagtttatccacatgtgccgtttaacacttcagagatgacagcagtgactttaagagaggggggcagggcaagcactaaactataatgaaaggagaatggaagtagaattatggacacattttcttgggaaaaagtaagttaccaaaaatatattgaataaggcattaaaagggctgtattttcattatattctgcaaaaaacacacctataacatatgagcacacctgaaaggctaggttttacatgaacaatcaattattataaagttcttaaacatttattttaagtatttattgttaatatttaagaaattgcattctttactgatacacctttaggcaaaaattaaagtagaatataccatataccagacatacacttccaaaaactattagaaaatattaacttagggctaagagttctgttaagttgtggattttttaattttaatttttattttactctaagttccagaatacatgggcagaacatgcaggtttgttgcataagtatacatgtgccatggcggtttgctgcacccatcacttaggttttaaaccctgcatacattaggtatttgtgctaatgatctccctccatttgcccccaaccccctgacaagctgtggtgtgtgatgttcctctccctgtgcctatgtgttctcattgttcacctcccacttatgagtgagaacatacagtgtttgactttctgttcctgttagtttgctgagaatgatagtttccagcttgctttccctcttgttgatacaaaaaaaaagttagttttagaaaaaacaacaacaaaaaacaaaaactacattgttttctcaacttcttaacatgtgttaaatccatgaagttagctatcagaaatttttagagaatgaagacaatcaagtgagcatggaactcagaaaataaagagctttgtttgcctcttagaagttattggagagaatccatgcccaaggagatatatagagtatttttctgcttgtctctgaagctcttgctgagtcagtgacccttagacatctgattcagaggctaccttaacctggctttttcagaccttgccctctaaactccaattaatcctcttgtttgctaactccttcgaaacatgtcctactttactatagcctgacttcaatatagttcctgcacctacttcccctcacaggcatgtgcatggccagcagtttggtgtccaaaccatcttctcaataataaattacttataattctacattctattacatttttcccctgatctagagtaagaaagtagaacaagatgggtgaaccctttatataagtaaattcaattcacatatttaattgtcaaataactctgcatttttccttttccaagcttatgaagtaaatgtcactacttttattttacatgtaagggaacataaatccaaatttgttaaatgattttcctaggaatgtactgtaagtaggttgcataggtgagattcagtccacacctatatgagattccatcatacatttctgcctctagtgacagctgtttgaaaatcagtcttagaataaacatttagaaggagaatctggaaggtagaacagcaatgtgaaaattgttctttgctctcctctctatatgtccgtactcttttagcccctgttagggtctttctatcatttcattaagataatgtaaacagagggggtggagccaagatggccaaataggaacagctccagtctacagctcccagcatgagcgacgcagaagatgggtgatttctgcatgtccaactgtggtactgggttcatctcacttgggagtgtcggaaagtgggtgcaggacagtgggtgcagtgcactgagcatgagccaaagcagggtgaggcattgcctcacctgggaagtgaaaggggtcagggaattcctagtcaaagaaattccctttcctagtcaaagaaagaggtgacagatagcacctggaaaatagggtcactctcaccctaatactgtgcttttccaatggtcttagcgaacggcacaccaggagattatatcccacgcctggctcagagggtcccacgcccacggagcctcactcatcgctagcacagcagtctgacatcaaactgcaaggtggcagcgaggctgggggaggggtgcccaccattgcctaggcttcagtaggtaaacaaagcaaccttgaagctcgaattgggtggagcccactgcagctcaaggaggcctgctggcttctgtagaatccacctctggggggagggcatagccaaacaaaaggcagcagaatcctctgcagacttaaatgtccctgcctgacagctttgaagagagtagtggttctcccagcaggcagctggagatctgacaacagacagactacctcctcaagtgggtccctgacccctgagtagcctaattgggaggcaccccccagtaggggcagactgacaacacacatggctgggttctcctctgagacaaaacttccagaggaacgatcaggcagcaacatttgctgttcaccaatatccgctggtctgcagcctctgctgctgatacccaggcaaacagggtctggagtggacctccagcaaactccaacagacctgcagctgagggtcctgactgttagaaggaaaactaacaaacagaaaggacatccacaccgaaaccccatctgtatgtcaccatcatcaaagaccaaaggtagaaaaaaccacaaagatggggaaaaaacagagcagaaaaactggaaactctaaaaatcagagcacctctcctcctccaaaggaacacacctcctcaccagcaacagaacaaagtaggacagagaatgactttgaagacctgagagaagaaggcttcagatgatcaaactactctgagctaaaggaggaagttcaaacccatggcaaagaacttaaaaaccttgaaaaaaaattagatgaatggctaactagaataaccaatgcagagaagtccttaaaggacctaatggagctgaaaaccaaggtatgagaactatgtgacaaatgcacaagcctcagtagctgattcgatcaactggaagaaagggtatcagtgacggaagatcaaatgaattaaatgaagcgagaagagaaatttagagaaaaaagaataaaagaaaccaacaaagcctccaagaaatatgggactatgtgaaaagaccaaatcgacgtctgatttgtgtacctgaaagtgatggggagaatggaacaaagttggaaaacactctgcaggatattatccaggagaacttccccaatctagcaagacaggccaacattcagattcaggaaatacagagaacaccacaaagatactcctcgagaagagcaactccaagacacataattgtcagattcacaaaattgaaatgaaggaaaaaatgttaagggcagccagagagaaaggtcgggttacccacaaagtgaagcccatcagactaacagctgatctcttggcagaaactctacaagccagaagagagtgggggttaatattcaacattcttaaagaaaagaattttcaacccagaatttcatatccagccaaactaagcttcataagtgaaggagaaataaaatactttacagacaagcaaatgctgagagattttgtcaccaccaggcctgccctaaaagagctcctgaaggaaacactaaacgtggaaaggaacaaccggtaccagccactgcaaaaacatgccaaattgtaaagaccgtcgaggctaagaagaaactgaatgaactaacgagcaaaataacgagctaacatcataatgacaggatcaaattcacacataacaatattaatcttacatgtaaatggactaaatgctccaattaaaagatacagactggcaaattggataaagagtcaagacccatcagtgtgctgtattcaggaaacccatctcacttgcagagacacacataggctcaaaataaaaggatggaggaagatctacgaagcaaatggaaaacaaaaaaaggcaggggttgcaatcctagtctctgataaaacagactttaaaccgacaaagatcaaaagagacaaagaaggccattacataatggtaaagggatcaattcaacaagaagagctaactatcttaaatatatatgcacccaatataggagcacccagattcataaagcaagtccttagagacccacaaagagacttagactcccacacaataataatgggagactttaacaccccactgtcaacattagacagatcaacagacagaaagttaacaagggtatccaggaactgaactcagctctgcaccaaggggacataatagacatctacagaactttccccccaaatcaacaaaatatactttcttttcagcaccacaccacacctattccaaaattgacaacatagttggaagtaaaacactcctcagcaaatgtaaaagaacaaattataacaaactgtctgtcagatcacagtgcaatcaaactagaactcaggattaagaaactcactcaaaaccgctcaactacgtggaagctgaacaacctgctcctgaatgactacagggtacataatgaaatgaaggcagaaataaagatgttctttgaaaccaaggagaacaaagacacaacataccagaaactctgggacacattcaaagcagtgtgtagagggaaatttatagcactaaatgcccacaggagaaagcaggaaagatctaaaattgacacgctaacatcacaattaaaagaactagagaagcaagagaaaacacattcaaaagctagcagaaggcaataaataactaagatcagagcagaactgaaggaaatagagacacaaaaaacccttcaaaaaatcaatgaatccaggagctggttttttgaaaagatcaacaaaattgatagaccactagcaagactaataaagaagaaaagagagaagaatcaaatagatgcaataaaaaatgataaaggggatatcactaccgatcccacagaaatacaaactaccatcagagaatactataaaagcctccatgcatataaattagaaaatctagaagaaatggataaattccttgacacatacaccctcccaagactaaaccaggaagaagttgaatctctgaatagaccaataacaggctctgaaattcaggcaataattaatagcttaccaaccaaaaaaagtccaggaccagatggattcacagctgaattctaccagaggtacaaggaggagctggtaccattccttctgaaactattccaatcaatagaaaaagagggaatcctccctaactcattttatgaggccagcatcatcctgataccaaagcctggcaaagacacaacaaaaaatgactattttagaccaatatccctgataaccatcaatgcaaaaatcctcaataaaatactggcaaaccgaatccagcagcacatcaaaaagcttatccagcatgatcaagtgggcttcatccctgggatgcaaggctggttcaacatatgcaaatcaataaatctaatccagcatataaacagaaccaaagacaaaaaccacttgattacctcaatagatgcagaaaaggcctttgataaaattcaacagcccttcatgctaaaaactcgcaataaattaggtattgatgggacgtatctcaaaataataagagctatctatgacaaacccacagccaatatcgtactgaatgggcaaaaactggaagcattcgctttgaaaactggcacaagacagggatgccttctctcaccactcctattcaacatagtgttggaagttctggccagggcaatcaggcaggagaaagaaatgaagggtattcagttaggaaaagaggaagtcaaattgtccctgtttgcagaagacatgattgtatatctagaaaaccccattgtctcagcccaaaatctccttaagctgataagcaacttcagaaaagtctcaggatacaaaatcaatgtgcaaaaatcacaagcattcttatacaccaatagcaaacagccaaatcatgagtgaactcccattcacaattgcttcaaagagaataaaatacctaggaatccaacttacaagggatgtgaaggacctcttcaaggagaactgcaaaccactgctcaaggaaataaaagaacggaagaacattccatgctcatgggtaggaagaatcaatatcgtgaaaatggccatactgtccaaggtaatttgtagattcaatgccatctccaccaagctaccaatgactttcttcacagaattggaaaaaactactttaaatttcatatggaaccaaaaaagagaccaccttgccaagtcaatcctaagccaaaagaataaagctggaggcatcatgctacctgacttcaaactatactacaaggctacagtaaacaaaacagcatggtagtggtaccaaaacagagatatagaccaatggaacagaacagagccctcagaaatagtgctgcatatctacaaccatctgatctttgacaaacctgacgaaaacaagaaatggggaaacggttccctatttaataaatggtgctgggaaaactggctagccatatgtagaaagctgaaactggatcccttccttacaccttatacaaaaataaattcaagatggattaaagacttacatgttagacctaaaaccataaaaatcctagaagaaaacctaagcaataccattcaggacataggcatgggtaacgacttcacgtctaaaacacaaaaagcaacggcaacacaagccaaaattgacaaatgggatctaattaaactaaagagcttctgcacagcaaaagaaactaccatcagagtgaacaggcaacccacagaaagggagaaaatttttgcaatctactcatctgacaaagggctaatatccagaatctacaatgaactcaaacaaatttacaagaaaaaacaaacaaccccatcaacaagtggacgaaggatatgaacagacacttctcaaaagaagacatttatgcagccaaaagacacatgaaaaaatgctcatcatcactggccatcagaaaaatgcaaatcaaaaccacaatgagataccatctcacaccagttagaatggcgatcattaaacagtcaggaaacaacaggtgctagagaggatgtggagaaataggaacacttttacactgttggtgggactgcaaactagttcaaccattgtggaagtcagagtggcgattcctcaagtatctagaactagaaataccatttaacccagccatcccattaccaggtatatacccaaaggattataaaacatgctgctataaagacacatgcacacatgtttattgcggcactattcacaatagcaaagacttggaaccaacccaaatgtccaacaatgatagactggattaagaaaatgtgtcacatatacaccatgaaatactatgcagccataaaaaatgatgagttcatgtcctttttagggacatggatgaagctggaaaccatcattctcagcaaagtatggcaaggacaaaaaaccaaacactgcatgttctcactcataggtgggaattgaacaatgagaacacatggacacaggaaggggaacataacacacgggcctgtcgtggggtggtgggaggggggagggatagcattaggagatatacctaatgttaaatgaccagttaatgggtgcagcacaccaacatggcacatatatacatgtgtaactaacctgcacattgtgcacatgtaccctaaaacttaacgtataataataaaaaaaaaagatagtgtaagcaaatatataggtacagcaaatgtacttattaccatgggaactgtcattgagcttctgtgcttttcttggtgatttaaatcgaatggctgatttgttctatcagtcttcctggaacttgaaggtaatcagatgggcctataatctctaggatcatcccttttcttcctcttttataaaggcaggcattacattggttctgttccacttcccagggactcagttactgaaaagagttgataaatgcactcagaatctaattctcaactgccctgaaatatgttaccatgtgctgtgaaattgaaccacataagcagatgttcctttaaaccgcccttctcccattgtttcagcagaacttgtttttagctgtttccacccatctatcagaaaataaacattttcttagactttcttttttgatatgtctaagtgaaattcttttctccatgttgttttttagctcaagacttttattttgcattttctccccagtaataataataagaacaataacaacactaatataaacaccattcttctaatgtgctggtcactgtgttaagccctttatataggctagtctattaaatcttcacagtaaccctgtacaataaataccattctcatcctcattttacacttaagaagtctcagggacagcagactcttttttgtcctctttcacaacttgaaagtgacagtgtcagattctaacagaaaatgttagcatagcctcatttttaaccattatgacattctttccagcctcattttcttccccaaagtccagttggatgcaaagaatgtagttcagttcaatactgaactgagattgaacaaaatgtagctgaattcagagaagttcaataaaaatttaaggactattaaattaaagttagtaagaagccagtttgataccataacgtgctgtattttatatacctagttaacctaaattatgtttttattttttcatttagcttcttacatgcttccagtttgaatattttgtttacatgtgccttttgtaaacatttttctaaaatttagaagtattttaattgtaatcatttattttaaaaacacgtagtatctatatatgccattttacacacattaagtgatttggatcttaaaagttgataatctaccatatttttcttctcattctccatagacgctgcccttttaagcatatttgcctagatgattgcttctggacagtcagagatttggcccccaagagacatgtggcaatgtttggggacaatttttattgtaatcacttgagggctggagtactggtatctagtggtagaggccaaggatgttgttaaacatcctatgaggaacagggcagcaccgcacagtaaaaaatcaccaagctcaagaaatgtcagtagggccaagattgagaaatcctgagtcctaaactatccctggggacattatcagcatggacaataggactgggctgtgcattcttccttttaggcaaatgtcattggttttattggctttatttttcctccgtcttaaacacccccaaccccccctcattgtgcttattagtgttttaattagaagtgagtgttagctttttctttcaaaacagaaatatcttggtgatgacagtaactgacaaaacatctgttaaatttttcacaaaaaaatttccttatttctcaatgttcttggaatgctgttgatgtttgctgaagtaaatttccagactccattcatttatcaaaatttgggtattctataatacaatcaaacatttatctagtatcgtaatttgcaatccctttagatgtaatcttcagtcatcaagagcaagttctaggctgctatgaaattaagttcgcttcttcaaattgtttgagcacgattgtcgtttagtaaaataaacatagctctattatttcttaatgtctttcttaacaagtataagattagactgcttctcacaaactcccattgggcagcatttaagaagtgagtaatatttctgtctgtttaagtcaagtaatcccaaatggaagtaatttatgggaaggcatcggggagagttacaatagacatattgcaatatgccactggaaatcaacatctccccacatgtttgatcaagagccagatggaagcttttatcatatttatttaatctgaaatacacatggtaattacactggacctttgattcaagtccttattaatgtctccagagaagtcaggaaatgagtttgtcagttgcaaactgatttagtcatgaccctctgggtagaatttacatctatcactgcctagattagagtagagctacaagtcactttgtgcctcaagaaagtgaagtaaagtaaaagcttagttaacgtgtgtaagaggagtaagaagctcctgctctgtccaaaatattgtttgtactatttttcattcatgctgctccagaatggctccctcctatgagtggtgtgtgagtaaagtagaatataaagtttatggccactatctcacaaagtaaaattaaccaaaacaccaacaaaggcacattgaagtgaaatactctcacatttcgagtcccaaatctggggtcttagacaacttctacaattaaacttagcagatgttagtatacatggagttttctttggattagtgataggaagaggaagatatcgcaaagatcacctttcaaaatgttacatttaggaaaatgtgagttagcaaaactttaatgttgaatgtttacattctaacttttcaactatgatgtttttacataataagaaaacatgtatcaaagatgaccagtattaatatgtataaaaaacattaaaataatatacctgttaaggtagatggagcttatttatctttggaggatgggtgtaatggaagacatcaactaaatgttatttttttaacattcaaaaacgtgcattatgattatgttattttattttcaaagttagaaaaacgaatatatatgtatttgtttaaagatttgtacatgtatatacgtgtgtatatatatatgtacagccttttgaaagtgctcacagaaaatatagcattttctgatatatttttgatgttttgtaggagaaaaatatgaattaagtttattaccaaagaataacaatagattgctattaagatgtataactaatgagaaatattcaggtaaatcacatacctactctgaaatgacttccacaattttattgcttgatcaaaatgatattaatggctattactgttgtcctaataaacttgcatagaattttatttcattaaattaaattaaaaagctattaaattaaatcctattaaaatttaaatggtaattaaaaaccataaaataatcctatcaataatttatttattatgctaagccaatatgatatatactacagctatcctgtggttatctcccatatttccattaacaatgttcttaagcttggttatttatctgtttccattgacatgacataactactgttatctccaataagtttacattgtacaaacaaggaaagcacatactgaacatgtattctgctggatgccctactaagaatgttctacataagatcccatctcattttcacaataaattttataagataagtgatcaacaaaggcaacattttacagaaaataaaacaaggcctctaactataaaagacaattaaaactaggattcataatcagggtctcgtttttatggcaagtcttttccgaaaaaaggtaaattttaaaatttttctttagtaaagaattgttgtacccttgttttttcctgttttgtatttataacaacaaaaacctttcatgtaatgtagtaattaaaatgtcttccatatgcaaagttaaaaacagttatgattcagtgaacaaaatagagaaccagatattaacacttctgattctaagtgagctgttgcgttagaatgtgactgtattagtccattctcacattgctatacagaaagacctaagactgggtaatttattttattttattttatttttattttttatttttttttttgagacagagtctcactctgtctcccaggctggagtgcagtggtgtgatcttggctcactgcaagctctgcctcccaggttcacgccatcctcctgcctcagcctcccgagtagctgggactacaggcacccgccaccacgcccggctaattttttgtatttttagtagagatggggtttcaccatgttagccaggatggtcttgatctcctgacctcctcggcctcccaaagtgctaggattacaggcgtgagccaccgtgcctggccaagactgggtaatttataacgaaaagaggtttagttggctcacagttccatgggctgtacgagaaatgcgatgctgccatctgctcagcttctggcatggggggcaggcatcagaagacttacaatcatagcagaaggcaaagggggaaggaggaaggtgagggtcggtgctacacacttttaaacaaccagatctcatgagaactcactcactatcaagagaacagcaccaacggggcggtgccaaaccgttcatgagaaactgctcccatgatctaatcacctcgcatcatgccccatctttaattcttggggttacaatccaacatgaaatttggtggggacacagatccaaaccacatcattctgtgcctgatgcttcaaatctcatgtccctctcacattgcaaaatacaatcatgcttttccagaagtcccccaaacttgtaacttattccaccattaactccaaagttcaaagtctcatctgggactaggcaagtctcttctgcctatgagcctataaaatcaaaaacaagtttgttactctcaagatacaacaggggtacaggtgttgtgtaaatactcccattccaaaagtgagaaatcagccaaaagaaaggggctacaggccccaggcaatttggaaaccaagcagggcagtcattaaatcttaaagcttcaaaataatctccttctactccatgtctcacatccagggcacactggtttgaggggtgggctactaaagcctcgagcagctccattcctgtgactttgcagagttcagtgcctgtggctgctcttatgggctggtgttgagtgcctgaagcttttccaggcacacagtacaagctgtcagtggatctaccattctgggatctggaggacagtgactctactcccagagctccactaggcagtgccccagtggggactctgtgtggggactccagcctctcatttcccactttgcactgccctagtagaggttcttcattatggcttggccactgaagcaggcttctgcctagacatccaggcttttccatacatcctctggaatctagatgaaagctcccaagcctcaaatcttgccctctgtgcacctacaggcttaacacatggaaccaccaaggcttaaggcttgcaccctctgaatcagtgacccaagttatagctggtcccacttgagtcacaattagaggtggagtggctgagatgcaaggagaagtgtcccaaggttgcacagagtagctgggccctggacctggcccagagacctaggaggacagaacgaaaccacctgtcatggagggcctgctgcaaaggtctctgaaatgccttcaaggccttttccgtattgtcttgggttttccacattatcttggctttttacttatgcaaatttctgcagcctgctttaattcctcacctaaaaatggacttttcttttctaccacatggccaggttgaaaattttccaagcttatatactctactttcttttttaaatatcaattgcagttattcatcatttcttggcttacacatatgagataggatgttagaagcagccagatcaaatcttgaatgctctgctatttagacatttattctgccagataccttacatcaacactctcaagttcaaagttccatggatccctagggcaggactcaatgcagccagtttctttgctaacacataactaacgtgacctttgctccagttcccagtaagttctttatctgtatctgagacttcctcagcctggagttcattgtccatatcactatcagcattttggtcacaaccattcagcaagtctataggaagttccaaatttccactcatcttcttatcttcttctgagccctccaaactttttccagcctcgcctattaccaagttccaaagtcgtttccacatttttaggtattctatagaaatgtcctactccttgataccaattttctgtattagtctgttatagcattgctataaatacccgagactgggtaatttataaagaaaattggctcacagttccacaggctgtacaggaagcatgatcctggcatctgctggacttctgcaggggaggaagcccaggtaacttacaattgtggtggaaggtgaagggggagccagaacttcacatggcaggtgcaggaggaagagagagccgagggaggtgctacacactttgaaacaatcagatctcaggagaactcactcactcactatcgttaaaacagcaccaaggagatagtgctaaaccattcaagagaaaccgttcccacaatccaatcacctcctatcatgccctacctccaaccctgggaattacaatttgacatgatatttggtggggacacagatctaaatcatatcagtgactttcaaaaaaaaactttgttatttgttattttcttgtgttactttgtaagacagttcgaacccttggtgaatgacaaattctagaaaaaaggaaaaaatggatttatttgaaggtaggagaaaagaattaaataaacacaatttgttatagaaacataaacaattacactaatttagaagaatgattataactacatgaagttttcaactgtaattaaaatatgatttattttaggttatgtatttaatgatatctatgaaaaacacagtctgtacctgtaaattgtatttgtattccttaagtagaggaaagctatagggttctatcattaaaattctgggacattcttaggtattaggtacggctttgaaaagttttaaaattttacttttattattataacatatagtgtggaatataaaatacagatattttaaggttgccatttaaatttttcttcagcacagttgaaatgactgtagtgaatgcatcttagagctttcagttaagtcttttcattggtatgtttggcctataaggttctgtgcaataattgttaaaatgaataattatattttatgtataacaagaatttaagtccagtgctttgtaacaatgatgtaggacaaaattttacatataattatacttcatattaacttgtaagggcagaattattttataggcatatttgccactcattaatatttaagtaaatttcttctgaagattttgttataggcttagttagctgcattttgcatacttatttctcacatttaaaaaatcacaatctattaattcatagagtatgcaaattttctgtatgcttaaatagaaagattaattactgttgtaatttaagcatagtatgtttcttacaaactttctttttctttctttttggaaaactaaagtgtattttatactcacaaacatgcacacaactatttctgtcattatatcagtgtctagatccatgactatctgatcactacattcttaatgataataaggtcatagcagctcctgataggtattaaataaatagctcatataaatagccaaatctccaagggttaactacactgaagttttataccagtattttcttctgaattcatgttataagaaatcaataaatttgataaaaccttcttccaaaattcttcctataacggagtaaattaatgtacttaacagatccaaaattaagtgacattctaagttggtttctgtaatacaatatttgaaatatcctagttcattttttattatatcctatcaattacattaagagactagattttccttgtaagtcaaacatttgaactctaaacatattttctacattaccttttgggtctaaatgcattttttgcgtgtacacttgacaaaaacttatccaccacttatacttttggtcattttggaaaataggttctggattgggagatgcggaagaaacccagtgatgtttggtctttgactattttcttccaatgtcttcgtggaatagtttcaggagagagcacagcacagagaacaaagaatctcaggaaaggaatcttctctgcaatttgggaaagttgttcacaagaacatgtgctcaggcatccataagccaaacaattactttttaacatgcagtaatcatggtctatcctcttgatagcaactttcccgtatgaaaattctcttatgctggtctaattcagcttgggtcaggttcagttttgcagttaggagcttggacaataacataatgataaatatttactaaaaaatctaaatttgttatgaaaatagtaactattttgcaagactgatttgtggttcaaatgagtttatgcttatttaataaatttaataaagtaataagaataatgcttttaataaatatgaactattatattttatgggacaagtattgtactaaaacttttgtatatattatctgatctgttatgcacaagaattttttgtgtcacctactattattatcctgtttaatagatgtgaaaactaaggtagagggaggttaagtaacatatctgtcatatagctagtgtataaaggaccagtaacagcaagatgggagtgattgagttacttcctatttgaacataacttagtacatgaaaaagcaatcagagaacatctatttaagcttaatattttaatatttaaaaaaaagcataagtcttttctactggtatgtgatgatctctttataatgatatatggaaaagacatatattcattattgtaactgagaaactggttcaattatcatttatagtggtttttaaaactcataaacatagttaatataacttataattatcatcagaataatcaattccaaaaatatataacagaattgatttgactatagtgactagtgttgttatatacattttagaactgacttgtttaaaaatatattttagtagaaatagtattgtgtgtctagtgtattggctcataaaaacttaatatgtttctaacaggtgatgattctaccccatttaagtgtttatttttccatcagatgtatttatacacatggataaacatcacagtcaattggtacagcctgaaattttagaataatgtggagtctataaacgatctcattggcaaatatttattctttattatactaagtatttaaaaaattcttctatactatttttgttgtttcctctgaaagcatgcttaatttaattataatcaagccatgtgtctttttttttcagcttaagaaatgtgtttacaactatattttactcttaggcgaaaataattgcatacaatatacttaacctccattctgcttaaacataccttaatttatctttttagattttcacagaatacattgccaaaatggatatatggcaatgtcatattgaagtcatttattttttttcttaatggttgttcctatttatttattttatgtgtgtggacagagaacagtgatgtgtgaagagtttggtattgttgacattgaaggcagaacagctccaagagagaaagacaggaagcaacagaataaaaagcagcaatttatatatatcacataaaataaactaggcactgtgaaatgaattttagcatatatttttttctgataaaagcaaccccaaactagaaaatgcaggcttgttgcaggatgtctaaccttatgaagctcattgttttatttgcatatttattgaacactttttagatatgacatatgcatatgtcctgtctttgtccatttggtctgctataacaaaataccaccaattgggtagtttataaacaacagaaatttatttctcacagttctggatgctgagaattatgatatcaaggtgcaggcagattcaatgtttggtgagggcctgctttttggttcatagatagtgtagtgtattctctgtgtactcacatggtgaaaagggcaaagcaatgcaactctgggcatcccctcttttttttttttttttttttttttttttggttttagagggattcttgctctgtcaccctggctggagtgcagtagcgcgatctcagctcactgcaaactctgcctcctgggttccagagattctctggcctcagcctcctgagtagctgagattacaagggcatgccaccatgcctggctaatattttattttagggcactaattccattaatgaaggaataactctcacgacctaatcaccttccaaaggctccacctcctaatatcatcacgttggtgattaagatttcaacacatgaattttggagggacacaaacattcagaccttagcagattcattataaactgattttttaacagtgactgttttgagaaaagcagagcaggtacctattctcatttataaacagagaaactgaaactctacactggtcacatggaaactagaatgaaatactatttgagatctctgagcttaaaaagagactactattttatgaaggaaaattagactctaagttatgtgcccaatggataacttagctgacttttctcagcagcaaatggccccatggtaatccatggcaatccaaaaacttattttattttccgtttgatcacctagatagcctttaaaaacatccttttctttcaccttcctcctgttatcacacaggtaatctcctcatggaaagttctctcactttatgaatgtcagtgggaaaggaggtgaagcgttttgtgaaggacccttagttctaatagctgcactgctctgctggttgagagtactctctggagttgttcagattcttcagagctaaaaaatttcctcacttgaaatagtcaaggaaatactagcctgcattcaccagcaaaaaagatcgctgaaaggaagagaactatgctagaacctacattttccaaaaatagaaataccatgttcggatacattttccatttaatttttgttctcaagaacaaacagggtatctttttcaaggacatattttatttgtgcccagcacattattgatcatgtataagtatagattaataaaatttattgtgaaataattaggatgtctgtaaataatgaagaaaggatgagcagatcagatcacgaaatgggacaatcttcccaggagggaagctgcagtccagtgcatgaaattagtgcacggagtggcaacagtttccttctgcactcctgataatcacattgcacttactgaaacagtttgtaaattgattgtatctctaagctaaacagccttggaacactaaaaacaaaccaaactaaaacaaagaaaatggtgattttataattagtatggcccaaaacgttgtgaataggaaacttatgtactcttacagatataaacatgtggggccatttgttttttatgagcttcatgggaaaataaatttgtgttacactaaatacattctgagaggaaagattaagttttgtgtttgcttggatttgctttaacccgtcattgaaaatctgttgtatgatgtagccttaatttaaaactcaaagtttctacacatattacgtatagttaaaactatgtgtaaatcactgcacaaatatgaagaattatatattttcatgttttctatctcttagatagtattcttaagcgtttttgtcagaaacagtaattgtacataaaattacgacataatagatggcccttgagtaagcgcagtgacgcatttctctccagggactttgcttatgtcaaagaacagtttattttttcccacaagttatgtataactgtttctaatgttgtaccatagtgcccctctttctgaagaattattctttttaaatagggggaagtgggcccttaagtatatggaaaaattctaatttaatgttagaatcaaactataaaaagcagtaattaagtacatatctggatgagtcatttatacttgatagtaacagttttattataatttagtattatgaaggggcagtgatccgttgctcagcacagcaaattggcatataaaaaacaatctgtttggaatttagcataagaatttaatattattcattcactcaatttgcttagctttaagaactgtgtaaaagtgctgttacaactatattacaagtgtaagaaacaacctttatcttcaagaaaacatatctttgggggaagataaaacttaaacaagtgaattaatctggaggagtaaactcctggactaaataattcaaggataattgacagagactgatcactgttgttcggactttgcatgcccagagggaaagaagtatgtcttacaggatgaagaagcataaataacaggagattatttagcatggatgggcattggattctccatcatgatagaaaaaaaaggaatacagactatgtggaaaaataaaatgctataaatgacctcaaccagctctcgttcccaaaataggagtcatcttagccatactaaaaactgacttccatagttaattttaaagcttttccaagattatttcaaaactagtttaagcaagctgtttcgagataactatgatttttctgagtacgtactttacatacattgaaaaaaattgcaatatattacatagagcctgacacagattaaatactcaacaaattattctcttatttaatcctcacccatcagactgccaccagattctttttccatctaatctcatgttatgcaaatctttctgtattaatattttccctaatctttcaaatagacacttagaatggttcacagttttcacatggagtaaattaaaagtcctgaatgagtcttttaaaaggctgaaaaaggaaacctatatttttccacatggcagcttatacgttccaactctcttttttttttcctcataaaactaacatttggatagtgcttcctttgtgtcagacattcttctaagccatttcagagtattgatacatttagtcactgacaatgctgggaaataagtattcacattctaaagatgagaaggctaaaaaacctgacctgtgtcacacagatagcagtaaatggtttaaggcttggtgtaaacaatttgtaaatccagagtttgtaagcagtgtcttccacttgaaaaattttcactgagttttctgttaatcaaaatttgactttgaaaacatatttattttaatatataataacaattgaataataatcactttctttgtataaaaatgtccttggaacttaattttaaaatattttaaataaaatgatttacattttaattatttcctaccattatatttataactgaaaatcaaatataataacttaataaagtattttttataaaaaaattttacatggtcagacgcagtggctcacacctgtaatcctagcactttgggaggcctaagcaggtggatcacctgaggtcagcagttcaagaccagcctggtcaacctggtgaaaccctgtctccactaaaaataccaaaattagcctggcatggtgatgcatgcctataatctcagctacttgggtggctgaggcaggagaatagcttgaacccaggaggcggaggttgcagagagctgagattgtacccctgcacttcagcctgggtgacagagcgagactccatcttacaaaaaaaaaaaaaaaaaattccaacactagaatgaaaagctacttgcattcatattttctacatactgttatcttaaaaggccagaaattcttcatatttgagtttgtaccttgtattttaagaacagaaaacacaatagactagacccttgatagaaaccccagcaatgatttcagagatagaattacattatgtaggatttctccatattaagattttaagtaaaactataaattagtgttatttttcactcgtaaatatttaaaattactgaacttaggtattataatttgacataattttctctttggagtctttactaagcatcaaataactctaaatgaaagttgttaagttcagaaagctttatgtttacaatatcttttgtgttttctgcattgtcaggtaaaagagattactaatgtattatcacatctcctgaaatttactccaacattaacaggctaatgccaacaaatcatgggctaatgcttgagaatgaaaaatgatctttaacaatacatgatgtatttatctgaataacaatgtagacacagctctctgttaagaaatttcagaaagctttacttcgtctttttattgctatgaaataggaggtagatgtgagaggaaatatgagaaattgccattgaaatttagccatttaaattatgtactcttcctgcatcattcaggtaatacttatcctcaatcccaaacatttgttttagttgctaagaataaaaacttaaggagaggctcttagttctaacagttatggggatttaaaaaaaagcatagccaaaaatattacttttttaaaaatacacttacttgtagacatataaagtaacttttctcatatccatattatctttaaaaccttaaaatcctatgaaaatatgttgatttactttgtcaatgaaatgaaagatggaagttgaagtatttccttcacagattataagaatgaataggatcaaataaatatgtgttataaattaatttcttcaaaagttatgttaatctatctctgaatgtatctgaaacaaactgaaaacaataatgaacatgataaatttaaattgatctacaacaaattttaacagatcaaatcgttttaatgtcaaaaaaaaaaggaaagagaaaatggcctatatatataatctgagattctactgtaagaatgaaggttacaggcaaaaaaaattaaatacatcaatgaaacctttccctaatagtgatctatatcctaagacactacctccattccattcactaggtacagatgtcatgtaattcatatttcagttgcaaagatagctgtacctgaattgatctactgcattaagaatgagcaagaaataccatcagcatcagaacagagagtctttgttcaagtcatcccaacagtaagatgaaaaatgagaaaagaaaatacaaggatatgtaaagattatttatttatttatttttgagacaggaactctgtgttccttaaacctctttttccttataaattacccagtccacaggtatggctttattagcagcatgataacagactaatacagaaagcatacaatttaattaaaaaataataatggccggatgcggtgactcacgcctgtaatcccagcacttttggaggctgaggtgggcagatcacgaggtcaggagttcaaggccagcctcaccaatatggtgaaacctcatctctactgaaaatacagaaattagccgggcgtggtggtgcacgtctgtagtcccagctgctcaggaggctgaggcaggagaatcatctgaacccgggaggtggaggttgcagtgagtcaagatcgtgccactgcactccagcctgggctacagagcaaggctatgtctcaataataataataataataataataataacagctttgaatatttttaatatgttaatatttaaacattttcaatgattaaaaattttgtttaagcacagaaaataacattaatgcaaacatatgacccaataccataaaactacacaacttactaaaagacactgaatgtttgaattgttaaagactcatgctgattatgtataatacactatataaagcaaaatgtatttataagtttataaatcccaataaataatctgttatattttgattcttccaaaatttttctgaacttgatagggggtgtttttagaagtccttcaactgatttttaaaaccataatactggtgtaatattgggcatacagatcactcatatagactagaatgtgcagaaacatataaaatatatagacaattattttatggtaagttacataaaattattgattaaagaaattctgtgggggacagctggctataaaaacagaagttatattttaacactttagcctcaaatcatagaccacaatacattttagaaggattaagatataataacaaaagggttagatgacaataaagatttgtatgcatataatcttattgcaaaagtgttttttattctatgacccacaagccacgtgtcataacataataatttaatggatttgattacataaagttgtaagactaatctatctgaaaataccaaaaatgaaaaataaagagaacttgctaaaaattgttaatctttaaagacagctgttaaagcaaaatttaaatagaaaaatgggcaaattgcatagacaggcatttcaaaagtaatgaattaaaatagctgaaaatatttagacattattatgttaacctgtaatttcattaatccaaaacatttaaatttagatgttacttttccacatcagaatggcaaaatattttaaaattatattttgatgttaatgcaatatggagaaaagaatccctcaggtgctgttgatggtggggggggggttgaatttgtacaattttttggcaatgtacattgacaatatttatcaaaagcctttacaaaatatttataccattgatccagaaatactttttagaatttaccttcagcaagaaagacaggtgcagagatgtatgaacaaaaatgatttctaagttctctaaaagagtgcccagttctgcaagatattcagcaaataaaatggatatgatttatgactgtctgtttatgaaaacttgagcaagaggtggatttttgaactgattccaaaggatatttcaagtaatacaaatagagaattcagaaatatgacaggtttattttttcctcatttttggagatttatgggcaatgatagaaatgtagggaaatacaagaaatagatattagagagctaaaattaactagtaactttaattttaacgtttaatgtttttaaagtaaagcttcccccaccccctcaccccgacccgcaacaggcatttcaaaggtgtattgttaggctgggtgcagtggctcacacctgtaatcccagcactttgggaggcctaggtgggtggatttcttgaggtcgggaattcgagactagcctggccaacatggtgaaaccctgtctctactaaaaaaatacaaaaattagccgaggctaattagctatggtagcggggcacctgtaatcccagctacttggaaggctgaggcagtagaatcgcttgtccctgggaggtggaggttgcagtgagctgagatcatgccactcactgaactccagcctgggcaaaacataaaacgaaacatagtgtgtattgttatttttttttttttcaggcagagatttagtgaccaatagctttacttactcctttgactctcttatcttcaactttcatctcctgagatcactcaggaggcttacatgtgtgaggtatttttatcggctgagccttcatttagttgtctagaacacaaatcactttgtttaatcaactgtaacagagactggaaaatgcctagttctaataactgaaagcaaagaagatgtttgttatcagctagaaatctctgccccaatatacccttctgatcaccgaatattttttcacctcgtttcctttacacaaaccactaccacatcccatctaaagaaacaacgtaaagttccatcaaaccaaggtatccaactcaaagctcaagatccgcagatatgcacaattctcttcaccatatctggtgaaaagaagtgaaaataagacaagttattaattctcctctccatcgcatacacaatacacatgatagaggagaagtacttcatgataataaatactcccatttggaattaaaccaagaatggtatacacagggtaatcagggatctgtagcaattataaaaacatgccaggctggcattacaagtcccctctgtcttgacaaggtttgttgttccctgaagaacctggattctcctctattcattcttttttgctttcccaaattctaccttctgttgagttcaacctagttagtcatagtccatgacatatttgaagtaggtgtcggggagtatgtcctccatcggggatacatagcttttatagtccacattttgcattcagcaagtttaggtgtctagacgttgtttgaagtttcaaacagtcagacttttttttctatctagacatatgatcctttgacacagcagttacattaaaaatacagaagactcacaatctatttgtcagattaatgttcctataatccagctctagtttttgaaggcattcttgccaagcctaatttacttctttactttcactgtccgttaaatagatctgtaaattataaatagctatcctgaggctatccgcaacaatgaacctgggagagcaggaagtacactcaatctgatctttgtcatagggctgagtcttagtggattttattgcccaggtcttcactcagttttatccttctataaagagctaattttccaaacttttgagtgcccaaatgtctgggtattcttttgaccttttcacttctttttttttaatatatatatatacatttttttattatactttaagttctagggtacatgtgcacaatgtgcaggtttgttccatatgtatacatgtgccatgttcgtgtgctgcccccagtaactcgtcatttacattaggtatatctcctaatgctatccctcccctcttcccccaccccacgacaggccccggtgtgtgatgttccccttcctgtgcccaagtgttctcattgttcattcccacctatgagtgagaacatgcagtgtttggttttttgtccttgcgatagtttgctgagaatgatggtttccagcttcatccatgtccctacaaaggacatggactcatcctttttttatgactgcatagtattccatggtgtatatgtgccacattttcttaatccagtctatcattgttggacatttgggttggatccaagtctttgctattgcgagtagtgccgcaataaacatgtgtgtgcacgtgtctttatagcagcatgatttatattcctttgggtatatacccagtaatgggatggctgggtcaaatggtatttctagttctagatccctgaggaattgccacactgtcttccacaatgaaaaaatgctcatcatcactggccatcagagaaatgcaaatcaaaaccacaatgatataccacctcacaccagttagaatggcgatcattaaaatgaccttttcatttcttcttgaaaactggccatccttttctgggctgatttcttgcctgtaaaatcctagtaaatgcagaacatgaaagtatattattaatttgtctctttccaatcactttctctagaatcacaagttccaccggcatctaaatcttgatgctgagtattcatcttcctctatcaacagcatttaacagtctcaacccctgctttcccgccaaaatacattcttccctttgatcaactacagtgttttctccaatatcgcttcctctctgaatgttctctccttttcagtctgcacaactggaagttcttcctcttcctgaattttaaatatggaagtttccagtggtcagttctcagacctcttattttctccatctagacaccaatgggtgaattagtcaatttccatagctgtaataacatttatataatgataagtctcaaattatcattttcatccccaggctttctcatgacattattttaacttgataacagtatagttttgttactcacaccaaagaaatatgcagacatacacacacatattttcagatggaggtgaggaggaaggaaaggtctatagctatacaaaattatatatgtatatttgcttatccaatcttttccttaaaatgtaagctcaatggcaatagtgattgatatatcaaatgttatatccccagataccttgtatattatatttgttcacaggatgactggtgtaatgcacgttaatgtattatttaacagaaattgtgttaattttcaaaataactcattctaatgcagttatgtattctgtgactaaataacacattaaatagaacaatattttcctgtcttttccagatcctaatgctttggctggccagaatggccctgaccatgctctcataggaggaatagtggctgtagttgtatttgtcacgctgtgttctatctttctgcttggtcgatatctggcaaggcataaaggtacgttatatttagccagagtacacaatgtgggcaaaatattctagactaacttcattataaaatatgatatcagtgcatatatgtttctgtacatgtgtagaatagggagatagagagaaatgctaaattatttcagcgaattcttaattattttacttaaatttaaagttggattggcttagcaaaataatgtttagccaatggccagatgtcatagagtaagccactggctcagaaaaatagaaaaaatatggaagaaagtttgtaatttatatctagaactgaaatccaactataactatttggttgatgtttttgtcagtttgtgaacatctgtgtagccatatttagtgaggaaaatatatattgtgcaacgggccaggtaccactttattgctgtaacctacttttaaagaagtttaccaaaagaaacggtgacaagtttgacatgaccgtttttaagatcttaacaaaatgtagtcccagctactcgggaggctgaggcaggagaattgcttgaacccgggaggcggagcttgcggtgagctgagatcgtgccactgcactccagcctgggcgagagagcgagactccgtctcaaaaaaaaaaaaaaaaaaaaaaaaaagatcttaacaaaagaccctgtttgctacagctgtaaggttcacattgattttatccatcattaaagaagtcacaattacttattacccatttcagtttggctcttgcctgtagtaaatcaagccataacttcacctgcagcgtacctgaaaactgtaagaaaacagtgcaactttagaagagtcaatcgggtagcatattaggtctcaaaaatctggcaaaagtttcttcctaaataatgtagctttaatgctgggtattttaccagtctcacagagctaacatatttttcttccaatatatgcaggaacgtatttaacaaatgaagctaaaggagctgaagatgcaccagatgctgatacagccattatcaatgctgaaggcagccaagtcaatgctgaagagaaaaaagagtatttcatttaagatgcaggccaagattctgagttttactaccaggctgaatgctggagaaaactggctatcatctttcagaagtcatttctaccatcgtctgctacccttattaactcccatactgtactgctatcagtagccagtgtataccaacaatcagctgttgaaagcatcattctttaattactgtaccatccataatgcaggacatttcttactgcctaaatttcacaccattgctcttttaacatacagtgcttgaatatacagccttaacaatgttaatcatctccttggatcattatattgagtggtttttatacattaaaaaatgtatgcagagtttttttcccccattttttcccctttaagtcatagaccttatcagtttgccattggacagctttcacaagtaacaggattagggaaggacataatgtatttaagaataagtgaaggttagaggtttacaattaatgttttctacatgtctgtcttcaaagacaacatgctttggaaacatatgtcctagaaaacataaaattaaaaaaaaacactatagtgtagtttttggaatgttggagattatactggtaaagctgtatcgatttgctattgaaatatagtatttgatacaggagccatgtgtacgaattgcaatcatgacatggtattttctataattatagagatcttactattaggatattgtagcttcatttaccaataaattattccaaatgatttactgcttttggaatcacaaatatttaattcatttctctaatttgattctataatttatttgcttcataaagattcacctgcctaaacaatattgaagtatccatagggcacaattttcagacattttagtatctgtatatagtgcatataataaatccaattaaacattatttgatacatatttaacttttttggctgtatgtaattcagtcataagtaagcattttctaacgtccattatatccctttaggtattacttaaaccaatattataagtagataacatgtattagtatttttgtctgtatgtcctagcactgttcaacaacaaatttttctagttcttgttaatttttatttgttatacaatggaagcacaatgttataaggaaaggtaattttaagctaacaaccagtgcacagcctcaggttttaaattacaaccacagttgaataataacctaaaaataaattttagtttgctaaaaatttacaaattttcattttgcagttccagagctgcttacctatgttggtttgccaaaaagaagtgtttaagatatgttttctgtataaatgaactaattctttatattaaattcctgtctatgcattttgtgaggtacaaactgatgaaacagtgagtgatagagaatttctgccatgcttttaactccaaagtgaaagtctctttctctggattattttaaaattttggcgtgtttaaccattaagaaatgctgtattcttaaatatgaaacagttaatctaaagtcttattatttcttctagtaaaataaaatattgttagattagttctcattaaatttattatatgctaaagaataaaactccagttagatttaaaaaaatcccatttacaagcattgcacctttaagaagaaaacaaatatgacagtatggtagctatacttgtgatgtctgacgcatgatggcctatggttttaaaaatagtattgtggaatatatttttgggtaataagaatggttgagtgcaacatcatgtattaatatcaaatgaaagacaagggtgctgtatctttgattatttatcaaaaaagtataaatcttttaaggaaaatgttagaattttaaagtttttttttgattgttgaagcatttatcttgttgatttcttacaaaagaaaaaggacgatgtcagtcaagcagcactttttcagaatatacagaacataaataatatgatgtggttgagtgttaacataataaatcatatacagtatgacattttaaggaaa

SEQ ID NO: 6 - DNA, 178785 bp, Homo sapiens
gaattctactaggtgtctcctaagatactttttttttgagacaaggtctctgtctgtcacccaggctggaatgcagtggtgtgatctcaggtcactgcagcctcaaactactgggcttaagcaatccacccatttcagcctcctgagtagctgggactacaggtgggtaccaccatggctggctaatttttgtattttttgtggagttggggtttcaacatgttgcccaggatggtcttgaactcctgagcccaagcatcatgcccacctcggcctcccacagtgctgggatgacaggcctgagcagccggcccaaagataccttcaggggaaagactgactctacacagtcccaaccttgggatgataaactaaccccaaacatggagtagtaggtggccccttactcccagcaagtccttctctaatggtgagattccaggacaggggagaagtctagggagagagactggggacatgcggccttccgggacctcagtctcacaccaccgggtcctgggctccctgttgtctcttatcaatctaggtttccagcgtggtgcagtgaaggagtgtgtgacccaggccccagccgcactctgcaatgacaccatgggcaagtcccttaaacccgctccagacctcagtttcctcatctgtcagctgagactactggacaaatgaccagatgaagttctagagccctggaggactctgtctgggctggagacagctcaagaccctgcccaggaagcagaatggcttctagtgctggctacatctgggcctgaggctgcttgcttatggtttgggactggttaccagatctgcttccagggatggtgtcatcgcctcattttataggtgagaaaaacccctttgtttcccgagggtcctgtgcagccttccctgcccctccagctcctactacctctaccttctgtctgtccctctgttctgaagctcctgtgttctgtccttgtcctactcaggcctgctcttctctgaggccacaggctcagggctctgcaggcctcttcatcatgtcccaggagccccaaccctcaaacaactgcccatttccctttcctctgtgtcaaaactccatgtttcggcctgcaattgtcacaggcccaatggacctttcacaccagctggctgagcttgaacaggtcacttgagcccagagcctggacacgtgtgaaacaaggactgcaataatctcacagtgactggagcagctgtctcacactgggtgcttactgagacaggctggacaccatgtcctcaccatcagcccatgaaatgagagccatctctctcccatgtcgagcttgagaatgtgcctgcctgacagaggtgtaggactgcctcagcaagggcatagtatacaataggtgcttaataaatggggacaattgtgttaagatttgtggaaccccaggggcagtggctcagcatcaggtggtttaaaaaccctctgccaggtcaaggctggcctggaattgaaggaggatagcagaggagggtgtttggtgggccctgcagtgggaagctagaggtggccaaggctggggaggtgggcggtgcaggtaccctgcgcctactgcattagccccatttttaaaaattgagatcacattacaaataattagccatttgatgagcggcatttagtatattgacactgctgtgcaacctctatttagttccaaaacgtttttcaccacctgaaaaggaaaccgcagaggcattaagcagtcactccccattctcctgtccccacagcccctggccattgctcaatctgttttctatctctatggatttacctgttctaggtgtttcatacacatggaatcacacactacatgacttcttgagtccggcttcttacacttagcgtcgcattttcaaggttcctccttgtagcccaggtcagtacttcattcctttttatggctgaataacatgtcattgtatggacagaccacatcttgtttgtccattcatccactgatggacatttgggctgttccatcgtgggctcctttttgaagtgaaagtcattgaaagcctggagtaagtcctgctatcaccactcaccccttgggaggaggcacagccccatccagagtcctcttcccataaagtgtcctctcctggcagcttctgtggctgccatggtgctcactggagcagctgctggacagggaagtggagagcacttacaagttgctttgcttttattcagatctcatggacaaggacagtgggagaagaggatgggaagagaacaggaaggtggagggagagggatggggtgaggatgatctcccacagaagcttctggaaactcctggctagtgactggagtccaacaaggcacaaagcctagttgtgctcaagtctcactgaagcctacctgagcttcatcaactggacagggcttggcttttccaggtggggaaactgagtcccagggagcagcagtggcttcccaaactgcagctgagtcggggataaaacctggaaatttagttgttcagtgtgggtttactctgccttccagcacagggcatggtgtaagcttggagggaccaccctacctccctagtgggctcagtccacagccggggaagtgtacgagtgtcagctcctcccattagataggtgatagagtcagcaagggatctggagccatgagttccagccaccacctgctcctcctgcaagcatcttctgccctcgtgccttcctctcctcacctataaacacatttattccctgataggtggctggagggcccaaatgagaccatacctgtgaaagggttggtaggttgtaaagtcaaacacactaactcttttggctcatcatggcccagacaggcaaggtccagctgtcttcttttcctggagggagatttgctctgtcccaaagggatatttgcctcacccacctctgggcctggcttcaagcccctttggccagtaacacacttgaacaaaacccttgctcctagccccaccccagccccagggaaaggactgtacctgatcagcattaatctgcccttgtctcgccagactcaggcttagttaagtccatccctggccagtagctctgtctccgtaaaatgaacacaatatttccccctgctccctcccacccatggctgcgccctcccaacaggctgggcggtgagccattgactgggcctcccatcctcagctaccagaggctgctccccggccttagccacctctaggtcatgagtgagaggtcgagggtccacacatctggatcacaggcctaggctcttgtggaatgtcaatgttagggtcccctcctcactcccttccttgcacacgttttttgcactcctgaatgtcatatactattctaggcacatggagaaataaaagtctctgccctcctggagcttctattctagtgaggggaaacaaatatgaaatttatacaggaaggaaattgtacagaatgttagaaggtgataagtgctatttaaagacaaagagaaaaggcactgcagtaaggggggtcaggagtgcagtgggggcagaggggaagcggcagcagcgcagtttggaagagggagatctggacaggtgttcctgagagggcaacagctgaggcgaacaccagacgtccccctaccagaggattgacgtttttagagtgctggcgtcgcacactagttttcactttttccagggtcaggaagacacagagttacgggtgtagctattctgcgtcatgttgggaggtgtctttctcccctatgggctgttctcctggagttcagggaggctgtgtggcctaaaaggggtctgtgtggcgggcacctgtagtcccagctactcgggaggctgaagtaggagaatggtgtgaacccgggaggcggagcttgtggtgagccgaggtcgtgccactgcactccagcctagggacagagcgagacgccgtctcaaaaaaaaaaaaaaaaagtccactaggaaaaagagatttttccttaactatatggagcttctctaggaaaagagaaagaccctctgaaataaatcttagaaactaggtttcagtgctagcccaactggttgccagttgtatgccactgggtaagttactttaccacctcgaaacctcagtttcttcatctgcaaaatgggaatgaaaaaccgcttttctgaaacttctccagttgagtaaaattctatgtgaaattgctttgtaacctaaaaaaataccaacgtaaaatagatttatctataaattgtatatgccttgttgtgtgagccaggcaggcaacttggaaggtggagacaggaatgggggcatgtcttctctgttgtcttcttccccgacttcctttgggtcagggaatcccatgctccatgggatgtgaagtgatcgagcggggaccctactgcctccaggggagggcttaatggagtcacacaggaagtaagatgctgctgtacagtgggctagctcttatcgtcttggggtccagcaggaagtgattcttaccagcaactgccctcaccatgaactgtccagggataagaagatgcaaccagtgagggggagaacagcaatgcaagacaaaaaggctgcctcaaagagaggcagagagctgcagaatcatccagcactaccctgccctgctcagggctaacaccagcattttgcagagggcactagaaggaaatctatactggatgagaacgtccctgagcaaggttagagctgctctggacaatctcagggctgggagtcctattcaagaagaggaccagctctcttctggccaatgtaaaaccatgcagtgagctctttaagcctccttaaagatggacactctgcaattatcaaaattatacctctggtaggtacaggttgacagctctgagcccactactagtttgagtgcctctcaactagcagtcttaatgacagcattctggagctgggcagtagccctgaggctttggggaccagaacctcatctttatggtccaaaatggcccactgtgtgtctgcatcaaaacagcaggatactgtggggcaaaccacagtccctgtcatggggcaaggaaaggagcccctactctggtcactctatttgtcactccctggaccctcatacttctttctttgcctttctgtctgccctgtgccccaggaggctcactcctgcaggctaagtctctctgactctttgccattggtttttggttaaccaatgggaggtaccatggaactctggacggtgggaggagagaagctgggggtgtttccacccagcgtcttgcagctgcatgatctccagggttgctgttcacttgggtgactcctctttcatggctccagctcttaaaaagtcggggacatttcctctcctaaccccttcagcctaggggtgctaaagtcttcccactgttgctagtttctgggagcctctccattccccatattgtcccttaacctgccacctctgtcagtattgctttatagtgtcttcatgggagccatctggagtgattctgtttctgcagagaacctgatgagtgcagcccccaaggggaaattatgtacacacatctggttcagatggaatagtcctgactcctggagcctatgttctgactcgtcattatcaacctttcctcttctctctttgcagaattctgccctctccaactatttttttcttctagatgtgctgtgcatcaccagagtcttggcctgagcatgcagttgcaatttaacatcttccaacaaatgcaaaatgactgtctcagtggctgaatgaattggctgagagtggaggacctgaagggatgaagctgcctttggggccaggtggctggctgcggtggctcacgcctgtaatcctagcactttgagaggcaaaggcaggggattgcttgagctcagctgttcaagaccagcctgggcaacatgatgaaacccgtctcaaaagaaagatagaaagaaagaaagaaagagagagagagaagaaaagaaagaaagaaagaaagagaaagaaagaaagaaagaaagaaagaaagaaagaaagaaagaaagaaagaaagaaagaataaaagaaggaaattagctgggcatggtggcatgtgcctgtagtcccggctactcaggaggctaaaatgggaggattgcttgagcccagaggatcaaggctgcagtgaatcaagatcacgccactgtactccagcctgggcaacagagcaagaccctgtctcaaaacaaagaaacaaaagaaaccaaacaacttagggaccttagagtcaccgttgacatccttcatgcaggactcacatgatccttcatgtaggagtcatgtatgtgagcagcctccctggaagacagccagccaattgttgtttgcatactttcagcgatggagagctcagtacatctttaagcagttcattctattactaaatgccttagtctaattataaattacagtcaaaatctgtgttcctctaatttctcttcataggacacagctgtgaacttcatacacagctgtgaacttcatacgtgacagtccttcaaagactcagtgattgtgtcctcctgagtcatctttttctctaggcatctcatgtcttgccccgtctccatgtggcttccaggtgatcccctttccttcttcccttctaatcttggtaggaaccctttacagcaggggtccccacaccctggccgaggactggtctgtggcctgttaggaatggggctgcacagcaggaggtgagtagcaggcaagtgagcggagcttcatctgtgtctacagccgctccccatccctctgattactgcctgagctccacctcctgtcagatcagtgacagcattagattctcataggagcatgaaccctattgtgaactgtgcattcaagggatctaggttgccggctccttatgagaatcttactaatgcctaatgatctgaggtggaacagtttcatcctgaaaccacccctaaatcccacttgatcatggcatattatctttttgattcattgttagattcagcttggtagtattttgttgaaaatgttttcatctatgttcattaggaataccgcctgtagtgtttttttgtgtgtgtgtgtgtccttgtcttgtttgggtatcagggtaatgctggccttatagactgagttgggaagaattccctcctctttaatttttgggaaaagtttgagaaaaattgttttttttgtttgtttgtttgcttgttttggtatttgcagaactttaattgccaaggcagaatacattccaataaatgaaaaaaaatggataaacaaatagacacattagagaatttctaaggttcaattaacatgtgagaatttcttaacctctcaaccatcaggaaaatggatattacaaccacaacaaagccacaagtcattggatcaagaaacgttaaaaagtctcacaatcctaaatgttggcaaagacgctgaccatcagaagcactgggaaaagccctttacaaagctctcaagcagcattcactaatgccaaatatcccagtggacagtggttccaatcccagcaaagaaatgctcaggctcaattcaaatgagaggcaggtacattcacagcagagccacctgtgatggccgcacagtgaagacagcaaatgcccacctgcagcagagtgggtgaagggcggtgcatttgctgcagaaagttatcagtggtgtagaccagccactccaggcccactgggatctgtaggactttgcaggcacaggccccttaccaacccagtggttacctggggtctgaatagttttcattcacagagatatcctcctcttggtactgaaaccctgagtcttttttgtccatagagccctgcccttctttgtactgagacatcatcgtgaagactgacgtctagaggtgggagcacctccgtgaagtgagggaataactgagtgtctgtcaagaagtcggaggcataggggctctgaggccacaaggggcctggggctggggctgggagtgatcctgggcgtgggcctagaactgggactgggcctgggagtgagcctaggcttggcatccaaccagagcttaagatggggcccgggtctgggattctctcatgcctgggatctcagcactttgggaagctgaggcaagtggatcacctgaggtcaggagtttgagatcagcctggccaacatggtgaaaccccatctctactaaaaatacaaaaattagtcgggcgtggtggtgggtgtccataatccagctacttgggaggctgagggaggagaattgcttgaacctgcgaggtggaggttgcggtgaactgaggttgcaccattgcactccaggctgcgcagcagagcgagactctgtctcaaaaaaaaaaaaaaaaaaaaaaaaaaaacaggaaagtctgttcttgttccgtgcatgttttcctaatggactgtttggttatttctcatttttgaactccagatatttgtgaagtcagcccttttcctgtgatctgagttacaaatatttgtccagtgtgaattgtcttttgatttttcttatggtgcttcatgccatgtagatttttttgaatttgtgtagtcaaatttagtaatgaatttattttatggtttttagatattgagtcatggttagagggactccaatcaccccacccacttcaaggttagaatggaattctctcacatattcttccaatacttttatgttttctaaccaactttcatgagatataatttacatataacaaaaggcatctatttaaaggatacaagttgatgagacttgacagatgtacatcctcatgacatcatgatttttctttaagtattaaatcataatgcatttggaatttatatcactgtctactttgagaaaaggactaaattttatttatttatttatttatttgagacagagtttcactcttgtcacccaagctgtatgtagtgcagtgacgtgatcttggctcactgcaacctatgcctcccgggttcaagtgattcttctgactcagcctcccgagtagctgggattacaggcacccgccaccacaccctgcttaatttttgtgtttttaatagagatggggtttcaccctgttggccatgctggtctcaaactcctgacctcaggtgatctgcccaccttggcctcccaaagttctgggattacaggcatgagtcatcgcgcccggcgtattttattctttcagttttcagatgattggccaggtgtctgaacaccctgcattgagatgtttcctttgtcccattctctatttctgtatggatttctgtctacatctggacttcctcttctatttgtctgtccatatatacacgtttactacacagttttaataattgaagctttgtaactgaattgcctttaataaatggtaccagctccaataccaattatagcagaaaacatggtcccctgtattaggtatttgagagcaagatggatgttctggatgctcgagctgagtttctttccctatgccaggcctcctttttactcttagagaaaggtaccccattttatagatacagaaagtgaggtgagatcaaggaaggtcagtccccaactgtgccagctctgaattttgtagggtttaggagcacccagcctcaaatgcccatttgtggatgagaaaactggttctgggtggagatggagacatgtggaaaagacagatctgatgatgcattatcactcaaccactcactcattcatcacttcaccccagcacagactgaccgtgtgctaaggccaagccctgcactggggcagagaaggggctgctccgtcccctgggatctcacggtgggctggagggaaaggcgaggaagcactgagggacaggaggatgtgactgtggtgggaatagagggaggaacggggctgtgggcgcccacagtggggcctcatggtcttagcctgggccccccttccaatgctgaaagtagggcaggtgcccaggactttgcagcaggaggactatttcgaaaagtgaatccagggagcagagtgagggtctgggaaagtaacggaggagaaaaaagctaagggtatactgtagagatgaccacattgaaggcaactgaggcttaacacagtgtgatctctaggacagcatctagaaagtgcatcacggccaggtgtggtggctcatgcctgtaattccagcaccttgggaggctgaggcaggcagattacctgagatcaggagtctgagaccagcctgaccaatatggtgaaaccgcatctctactaaaaatacaaaaattagctgggcgtggtaactagtgcctgtaatcccagctactcgggaggctgaggtgggagaattgcttgaacccgggaggtggaggtggcagtgagcccagatcgtgcccctgcactccagccttggtgacagagagagactctgtcttaagaaaaaaaaagaaagaaaaagaaagaaggaaagaaagtgcatcagactgtgcatgtctctctctcagtgaaaaagggagaagcatttaactccaggttcctgtctccattggttgagggctgtcctgtgggaacagggcaggaatccacccggggtgtgtggatctggtgacagccagcatgcatggactgtttgccagagctgtggctggaatctggagccaggtgagaacagatgaggctggacaaagggtctcagcctggttcccaggtatgggacttgacggccacctagctggccaggatgggaaatgcagcagggaccaggacagcgagggaggctgctctgggtccccaccccacaaaggaggcaaacctgtgacagggcagccctttcccctggaagtccctgcttcagggacagacccagaggctccacacagcaacccagccacaagggaggcctacgtgtccccatgtgatgggctttcaaggccccaaggaggtcacggcttggagtgcaagaactcctcccaactgctgtgccgccccccctccacctcctgccggctcactgctttgttccctgctttctctttctctgcttctctctgcttctctctgcctccctctttgtccttcctttctctctttctgtgaccctgtcttcaacaactctttcccttcctctattgtgctgtttgtctgtgattctctccagcctcctctccctgtctcagtcctctccatctctcttgtttcctctgtcttcattcctctcttctcttttactctctgccttcctctcggtatgtggatcactggccagctctctggacacctccctccctccagctcccttggttctcactgtgggtccttctgtctttgtctcttccagctttccttttctccccctgggcccaaatcaacttctctccatgactccatcctcccatctccatctctctctctctcccctcaccctccaccttctctctctctcccttctctctttctctcactgtttcaacccctctctctctatcctccctgtctttctccttctctttgtccttcccctccctctctcatcccttctctctcatcttctctctgcctgtcccgtcctctgactgacctcacccctgcgttcttcactcctctccagtacagctcagttagcctctcaccaccgatctctgcctatcacacaatttaaaaattacaggaagatggtggggggcacaggacttatggagaaatgtctacacccagctcagcttcccttagagccgcctggagttggtgctaccggggggcagctggctcagtggggcatgggctctgacaaaccctgagtctctgcgaggctccttaagggctccacagccgctgctgggcccttctattccctgtcagaagttggccacctcatggggatgtattcctgtctatctgctcacaaggcaccactggcagtcactaggaacacagtgactctttctagaatgaatgagcacaacctccacccgtggctggatacaggatattcccccaccccagaagtccccctcgggcccttaccagtcaacactacccaaagggtaaccctgcttctgtgtccagcaaggcagtatctgcctgagtttgaatagtgtacgaggagtcacacctggtataccctggggtgtgaactggtcctccaggaagcagacacccagaaagataggactgcaaatgtttctaaagggaaacactggaaatgagagagagaggagggagcacggggcatggagcatcaaatatggtggagacttttccaagatatcatggcccaggagactcttcaaatttcaaaattatcctgtaaggtaaaaagatttcggtttatttccaggtgaccttcttttgcccaatatacattttgtcttctatgaaatatctgtgcccctgctgaatacttctgtgtgtggccatatctgtgtctgtatgtcatggagaataattatccacagatcacagatacaaatctcagagtttaactgtgtatgcatttttaggatctcttcatctcgtaaggatctgaattctaatcttggagacaggggctttcccttatcttttgaaagagaaactggaaatcccagagcctgagctgctacaccctaaggtttattaaatgaacttcagtgaacaccttttgctgatcttctgactggaaatattttcatttaaccagcgggaggggtgaggctctaccatctaccagctattttgcaagatgccttccttatgagcttggtctccctgtcctcaccatgacctcataatcgcatcattcccagctcatttctgagaaagctggggctctgagctctactgagagttggtgtctgggcttaggcagcaaagacacagggaaggggaagcattttgcctgccaaggttgggagatgcaaagctgagagttgtaggtgggaaggagagggtgcaggagatcagagtaggtcacagcagctcaggattggccttgagtttccagccagagttgacctcattctgaaggccaaggccgcagctccactgaaccagacccatcctcattgttagtctccttaggccgtgaaaactcagggagacaggttcccctgacagaaccaagttaaaattttcagacctctaggcattcattcaccccgatctagagccttcatgcacccagggaaagaatcatcttcctaccaataatggactaaaggctgtagggcaacaaggaagtgctggggtggtaatttcctgtgcacaatgtggtatctgagctcccatggcagctctgtgtggccctcaccgcagcctccatgctcctgctcacgctgcttgcctggctaggagcagccttccagctctacctgagttcaacaaccccccatgtcacacctccctgcttcagctttctcttccacagcctcctgtttactcccaggagattctgtctcctccttctgtaccctgtgtcccttcacttgtgtttccattgggctggtcagaagctctgtgcccttcagtgtgggtctctctgctgcagcacacaggatgccctgccagtcagggatgggtctcatccctcacagagctggccatatggcccaggttccacacaagcctgcaaagcttgtatttctagcttctataaacaatctctggctgggcacagtggctcacacttgtaatcttggcactctgggaggccaaagtgggcagatggcatggctccaggagcttgaggccagcctgagcaacatggtgaaacatggtctctacaaaaagtaaaacaaaaaaacattagccaagcatggtgttgcacacctgtagtcccagccactctggaggctgaggtggaaggatcacctgggccctagaggcggaggttgcagtgagccaggagtgcacccctgcaccccagcctgggtgacagagtgagactctgtcccccaccaaaataaaataaaaaaaaaaaactctttccttatctacagaagatacctgctgccaaagtcataatgagaaaataatgcaactgatttgtagtctcagaaacttgagcaaagtgaccacatcctcagccagtgctaccctcatattgcaaagccttgcagtacaatctgtgacatttctattcattcaaaaaaggaaagatgagtccattttgcaacttagttcatactgttcagataaacataccaagtggtacatgtggagttggtggttgaggtcttacaggccacaatgggtagaggagctggttgaggtcccagaggagttggttcagatagcagaggccaggcaagtggaggaggtggcagatgtactagaagagaccctggtggaggaggtggctgaagtcccagggaccacaagtggagattattgaagtagctgaggagattcatgtgaaggtggttgttgaggggccagagggccacccaggtagaaggggtggctgaggatccagagattactaagtggagatgtagtcggaggtcccagaggcctcacagaacaaaaaggtgaatgatgtcccagaggaaaggcagctataaaagatggatgaggtcccggaggacagaaacatgcagaagatggataaggtccgggaggacaaggagctgcaggaggtggatgaggtcccagaggaccaacagctgcaggaggtggatgagatcccagaggacctactggtgcaggagatggatgaggtccgagaggaccaccagctgcaggaggtggatgaggtcccagaagacctacagctgcagaaggtggataaggccccagaggaccaacagcttcaggaggtggatgaggtcccagaagacctacagttgcaggaggtggatgaggtcccagagaacctaccactgcaggaagtggatgaggtcccagaggaccaacagatgcaggaggtggatgaggtcccagaggactgacagctgcaggtagatgaggtccgggaggactgacagctacaggaggtggatgaggtcctggagaactgacagctgcaggtggatgatgtccgggaggactgacagctgcaggaggtggatgaggtcccagaggactgacagctgcaggtcgatgaggtcccggaggactgacagctgcaggaggtggatgaggtcctggaggactgacagctgcaggtagatgaggtccgggaggactgccagctgcaggaggtggatgaggtcccagaggactgacagctgcaggtggatgaggtcccggaggactgacagctgcaggaggtggatgaggtcccagaggactgacagctgcaggtggatgaggtcccggaggactgacagctgtaggaggtggatgaggtcccggaggactgacagctgcaggtagatgaggtccgggaggactgccagttgcaggaggtggatgaggtcccggaggactgacagctgcaggtagatgaggtccgggaggactgatagctacaggaggtggatgaggtcctggaggtctgacagctgcaggtggatgatgtccgggaggactgacagctgcaggaggtggatgaggtcctggaggactgacagctgcaggaggtggatgaggtcctggaggactgacagcggcaggtagatgaggtccgggagaactgccagctgcaggaggtggatgaggtcccagaggactgacagctgcaggtggatgaggtctcagaggactgacagctgcaggaggtggatgaggtcccggaggactgacagctgcaggtagatgagatccgggaggactgccagttgcaggaggtggatgaggtcccagaggactgacagctgcaggttgatgaggtctgagaggactgacagctgcaggtggatgaggtctgagaggactgacagctgcaggagctggatgaggccctggagaacaatcgagtggaggaggtggttaagttttcaggggactctctagtgcaagaggtgcttgagttcccagaggacactccagtggaggagtttgttgaggtcccagaaaaccttcagatggagggagtgtttgagttcccagacaacacccggtagaggaggcggctggcagcccatcaatggtcctgaagggccagccatgagatcgggcaagtagggccattctgagaaaggatgagcttccctgcagccacattgacctacaagtcaggaggagaaaatgttttgaaatatatgaatatgatggacaaaaacaccaaaaccaacacaagctgcaccttatgcctcgggtgatagtcccttgcacctttccctcctccaggtttcaaaatggcagcatgaatgccataaagtctcccttcaactgagtcctgccaacagcaggggagtgaagaaaagtcgtggggacaaactgctatccccacacgccactctgtctgcaaatgtacgcaggctgggggcctgtccctgggaagacagagtcataacccagtaataaagaagcatgtttctgacacaggggtgtctatgtctatcctaattcctccctcaccatcatcaccggagcatgttccttgcatcagataaacagagagaaagagaagcatgaaaagcccattgtccacacatgagtcacagctactcttaagagaatggcctccaggcttttcatgtgctgtctctgattctcagaaatctacaaggtcagtgtgaccaccctgctccaaatctaagaaaatagaggctccagaggaaggagaaatttcacctagcatcacacagcttgcaagaagcagagtggaagtcgattccagctctgcctgcaagaccctctcgtcccccttctgcttcccttcttgacaaacggtcttctctactttggaagcgccatccatgggcacaaagagctctggggagatggggattcctgaagagctgcaggggaactgggagagggttttctgacggaataatcttacatagagatatcagtttggcatggttatcacatttctttaacttctaggtaataccaaattttaagtgcactatgacataaggaataattttgtccatggaaaaatgaggtgggaattctcaacaacagaagttttaaaaatatgtttgatttcaagtgtacaagtcccatcgtgtgtgatcagaggattcagcagctgtcgaagacacagaggccacacgagaaccagcttaattgagcatcatttaaggccttcattgagaattgtccctgtaggtaatgagtgacgttcactctccactacctcacagccagggcacattttctattaaaatatggaacctctgacacttagaatattagatcaagggcaacactgggtgagggtgggggcgtttttgctcaacacagttaacaacagagatgggactgtgatgaattatggaattgactttgccaaagaacattcaaaattgcacaaagcacatattaatgttggatcaatgagttttcacttctgggattacggcggatattctgaaggttaatcacttaccttatagcagaaaagaaaatcacagcaaaaaaaaaaaggaaaccccacatattttggaaaggggatcccacaccatcttgagtaaaagggatcagtcagggtctactgggccataagacctacctcagtggagttcaatggcttcctctcatgttatttctggaaacagaacagtgacagccctgcagcccttggcccttaagcatttatggcttctggaggtgccaccaaagatgaccagctggaaatggagaagcctgaaagctcatggggaagattttgctttcaaaaaagtccagttagaaaaggcaccacagaacccagagagcagaggacaggccaggagagggcgctgtaggaaaagacaaaactgtcctgaactaggcagagggaaaatgactccagcatttacctttgtcttctctgttttctggctatgtcttctgattctttaagaaaagaagaaatattgatccatgaagacatagccagaaaatttctgctctcatcagcacttatggctcccattctaaaatgttactagtgttacttttctcaaataataataaaaaaaataaagccttcccactgactcaaggttggaaggggagctgacccatttgccttctaggctcatcccctcagttaaaagtaaccaagacatcagggtggaatgatgtccacagtcagtggaggggcctgtgctccgctattcacaggggaccagccaagagtcattcagctgtggcacgtgagaaaaacggtcctgccacccagcgggataactgttctctttagtaagtgcttggaactgtttccaggaaacataacaataacccaacccaagccctcaccccagaaaggagaagcaggggtgtggattgtggagcagaagttaagcgggtgccttcccagagagctcctacctctccagaaagggttctctagccctagctgtccctgggctgcctcctgactcatgtgtctctccagcactccctgcttttccatcatttcctgtcttgaagacagtgaaagagttgacttgtagaagaattaaaacactgttttctttactagacagtcaaagcttcatcttaaaacaaaaacatccttaaaatttgtccatcacaatcacctacctgtgctgcttgcaggcagccttcctctctgccatctccctctgcaaggcttgagcacagagctgtggggagaaaaatacatccatgtcccgacttggccgaaaagcaagggaaaaatgaacaaacttacccagttgttgaggcctttcttgcagcagaaggggcgatctgaaaaagccaacacatgagaaaatgtatgttgacagattctaggggcagtggcatcatcttgatgagcgtttaaggatcctgcaactgcaggaaggaaggctccttacctctcatctgtaggagtcctctacccactgctgcagctcttgtctgtcttgaatcgtttttctatggtttagaatcactttcatcagacacagcatcatctttagtatgattttaaataatctgccatgttcctgttgtcctcacaattgtacccttacacaatctatctatacatagaaaatgtatttcacatggctataaaagtacagtatgatcaaaactgttgctgtaatgcttcctcctcttttacttaatgcctgctgggttctgagttgacaatttccttacccattttcagtatgtccctaattcatgcttcattgggcatcttttatcataaagctctattctcctggaattaatatccttgccatatttcacagggcagaaacagctgagcttataaataggcacagtccttttgaaggatgggttgatcctacaacaacacactttcctaaggatgatgacaactcgcatcacccctagaacggctggtatgaaccgagtttccacacagtctggctggcattgcagtcaggagatgtttggctacttcacatgttttgaacactagtaaatcttaaggtacttgtgttctctggtgtgaattgtctctctctctaggtatcgcttctgaccatttgtttccatttctgtgttaactgggtctaaacattgtacaaagatttaaaacaaaacactccaccagcgcttccccaagaggctggtgtcggtttccgaacccacttgcagatgggtattttttctagagccaatttcatggtttcttccacctctgacagccgcctccccttttcttctcgttcacgttctttcattctcagcttcctgagtcgagaagggagagaaatgcatgcacgtgctccactggcctgtgtgggattccttgcggcatctgaaggccgtgattcaaaggtcccctgacaaccttcccataaatgaaccaactgatcctcacaactggagggagaattaacaccttccatgggacaaagaaaaagcacattctggcctgctggcaagtcacctgtcgtttccagctcatcttcatcgctctgtattcctactctttagtaaatatgaactattaaaagcttctatgagatgcgctatgtgtgcttctggggtcagtcttttgcctgacatagcgaaagctcattttagttcagtgtagaaaaccagacctcaccagctcatcacaactaaacccataaggacggagcagaggatcactcctcgtctgactcctcccacagggaaacctgattctccatcagaggctgatgccagaacccagacaatcagcctcagagagatccttccaggacatgctgtcattagccctgcggttcactactgcacatgtccatgattcaggactggaactcttctcatcgactttaaagatcctggttgagagaaaaggccaatctgagtgctgggtgcatctactgaattggaaatgatccaatggctctttagtcagggtgttatgtcctgaaaataggtgacaactgcaaaccatcctctggtgtccagagactttaacaaggtttgtttcacacagactgagggcagaaaaaaggaaatggcctaaaaaggtgggtttgctgtgttgcctcacactacttgattcatggttctgattctaaaaatctcacttgatacttgatttcatatgaaagacgtgtaaaatgcctgggtagaggcggcggcggcggcggcggcggcggcggcggcgggctcggaggcagcggttgggctcgcggcgagcggacggggtcgagtcagtgccgtttgcgccagttggaatcgaagcctcttaaaatggcagatgatttggacttcgagacaggagatgcaggggcctcagccaccttcccaatgcagtgctcagcattacgtaagaatggctttgtggtgctcaaaggctggccatgtaagatcgtggagatgtctgcttcgaagactggcaagcacggccacgccaaggtccatctggttggtattgacatctttactgggaagaaatatgaagatatctgcccgtcaactcataatatggatgtccccaacatcaaaaggaatgacttccagctgattggcatccaggatgggtacctatcactgctccaggacagcggggaggtaccagaggaccttcgtctccctgagggagaccttggcaaggagattgagcagaagtacgactgtggagaagagatcctgatcacgctgctgtctgccatgacagaggaggcagctgttgcaatcaaggccatggcaaaataactggctcccaaggtggcagtggtggcagcagtgatcctccgaacctgcagaggccccctcccccagcctggcctggctctggcctggtcctaggttggactcctcctacacaatttatttgacgttttattttggttttccccaccccctcaatctgtcagggagcccctgcccttcacctagctcccttggccaggagcgagcgaagccatggtcttggtgaagctgccctcctcttctcccctcacactacagccctggtgggggagaagggggtgggtgctgcttgtggtttagtcttttttttttttaaattcaatctggaatcagaaagcggtggattctggcaaatggtccttgtgccctccccactcatccttggtctggtcccctgttgcccatagccctttaccctgagcaccacccaacagactggggaccagccccctcgcctgcctgtgtctctccccaaacccctttagatggggagggaagaagaggagaggggaggggacctgccccctcctcaggcatctgggaagggcctgcccccatgggctttacccttccctgcgggctctctccccgacacatttgttaaaatcaaacctgaataacactacaagtttaatatgaaaaaaaaaaaaaaaagaaagaaagacgtgtaaaatgccaagaactctaggaaacagggacaaaaacacttcaaagagaaagttcatgcacttgtttctgaccacccagggcacccttcagcacacgctgtctggagtggcctgaagcaaggagtgtcttgtgaggtgcagaggatgcaatgggagcagggtcctgtccccaccctaaaggagttcacagtttaacgcaaatgagaagccagtgaggacatcactactcctgctgtgaacttgggaactagaaacacaaaacctgagtctggagggaagctaaggaagcattctgctctggagtagacatgagtgcgtgtgaagcttctgatctcccatgagggcaatggggacatggggcagaatctaaaacccatgactgaaagcaccaaattgctaaaatggcaataaagagacatgaggccaagatggagaagaaggaacccaggacgagggtcagcctcacatttggggctcatttccctcagtttcctcactgaatttcagaagggactaactgagatgcaaagaagcagagcagcttttgcaccatgtggaggactagatggaaaacaagtagactgagggtctgctagtgaaggtgacccctactgaagtccactggctttggttgggacccagaagagtcacacgccaggaatagaggtggacaggaaacaccctgacttttgtagggactgaacctcactgataacctcaattgcggatggtatggagggtgtctaggtgtgctaggacccctgcccattccccagaaatagactcccatcttttctgcagcaagataacgtgctagtaggcctcaattcattgctaaatatttttaacgagtgtcttacatttagccaaaaagactagtcatgtggcaggaaaaatacaatgtcatatgaccaaaagctaaaagactgtgaaaatgaatccagaggtgacccaagcattgaatttaacaatgccagtacctggacctccgcttgcccctaaaacattacaatcaagaatgtaggaagggaaaggaaacacgaagattaatcaagcaggaaggacaagctcagttttgcacccactgaatttgccacaaatattgtggaaaatattctcggggacattgcagttgtctactttggttggcacatggttcatacaacagtgtttgtgtcagtgaacatcttactcttcctcggcagtctttctttgcccagagatttcgcaatgactgttgaccttcatcatcaccttttggactttggcttgcactttagcttctgtagatctccatgatgtaaagaagtattttaggtccattttaattcctgcaaaggataaaatccttctatttgtgtgcatataagtggacctgagcccttggttagggtgtagagaggagaaggggagaaacctgagggccagaagctgttctttcccttaaaagggcaaactcatttccacactatggggactctgacagatagcataccttcctgtctatggctattggacctgcaggctttcccctgtaaatccgtgttctgtcattgacattttgtgactgtaagacagacttgagataagacatctagaaaacaataattgaacaattatgtgaatatatttcacacaactgaactgtacatttcaacaaggttaagatggtaattatcacgttatacattttttaccgcaggttaaaatgtttcacaggttgaaaggaaagcaactaccttcagttctctgagttcaagaatttgtaacatttcaccccctgctccttcctgatcttctgtggagcatcttttttccatccatgctctactcagagcccactttcccttccctgacaccagcttcactgaggctggttggaacctaacacaaaacattctcagtaatgactgaattcccacaaagaattccatatagactgcatatgagttgaatcttctaagacatgaaatatttgttctcttcttggctaatatgcaatgcaaatcctgttgcagatgtacgtcatatacctctgaaattcctgatgtattcaatgaaataacatctttaaagttctgtgtagaatgtttttttttctgatttcttcacatacgatagaaaaaaaaaccccaaaaaacatgtactaggatttcaatagaagcaatgggtgatctaaaaagatgaaagagcaaccgcatgtgccctacagctaccgctagattttatggggaaagcagctggcccagtttgcagctaggagaaatgtcaaacacatgaagaaatgagaagcaaagaaaaaccgtgaggcatgaacatttcatggcaatcacgatgtcctggtttgtgagataatgggatagaggagtagaaaacaaggagaaagatgagaaggtacaaagtggttcaagtcaaacagctcaactgaacttttcttaatggaatatttaaaaagtggtacattaaaaaacttcccccagttcacatcaaaaattctctcttcaggactaagttgggtagagactgttcaatgtgcctagatatcttcagaacttatatattttctgttttctacgtatgttgaagggcagtgccaaatgatgtgtaattatctaggttgtaaaaataaaacatactcccccttcccttgaggataaaaaagcattgtggtattagcacttttttcttggatcattgttcagaagatgtttaagcccctagacacccaaacttttactgtcatgaacagcaagagaaaacgtagagctcgatttactcaatggacaaaaatgctcaaaagccaaattatggcactatttagcagccacattcttaaccagtacagacttttgacataccgatccctctccagtggcaaccgagaacgtgtactttgaatgatgccatttgaaatgaccactcattactctgcccagacacacttttcattgattcttcggagggcagttccaagagattctctggggctttctctgcatcatgagacacagtgcagttctgcccttgaccttcctgcagtttgtcgcctcttcctcatgatctcagaggaactttgtctcaggccagctgtttgttccttgggctctttcatttcccctaaaaatcatttgctgccctgccttcatctccatctcccgtttccctgagaagagggtgctcattaagcatcaatcatctggcccttcttgcagtctcattttttggctggctcccatgtttatgcatgttaataaggttctatgttttccttctcctgttaagctgtctgttgttagtacattgctgcagtgaacttttagagaggagagtggaagctttccttccacccatacaatagaactataaagcagaaaagtttagaaagaatttcttatttaagtgctgaaactttatacttcagtttttgataaagagcagagggcttaaaaaaaacgtatttttgaccaaaagctctgttgacattctattaaacaaacacaaacctatttaattttttaattaaataggttgaattaaaaatttaaaaaaattttaaaaatctgccataatttaaatggcagatttttcataattcttatgctaataaatcatttcctgattttttaaataaaacccaatattcataatgaagtccagaaccacaaattgttttaaataatttcttatttgtgattacaagtccacctctagggaaagttagtgtactcacaccaaggctagttttgcagaagaaaatggcaagtttgtaaattcccagggacacaacaataatgataagcatccaaggaattccaaaaaagtcaggcccgggatgaaaatgcccaggcagaaaattgacgatatggaatactactagttgacataatgagaaggctcaatgacatttacaatatttcagttacaaagaatcatccttagaaacccttaacctcctccaagaagtaaccactcccctcagatatccccgggcaattccactgcttcaggaaagattggaaatttccagtctcatgtttcttgcatggatggtagtgtatttaggcgtgcaaatgtgggctgtcttttttcttggtctgaagcaggcatgtccagtcttttggcttccctgggctatattagaaggagaattgtcttgtgccacacataaaatacactaacaataactgatgagaaaaaaaaatcacaaaaaaatctcagaatgtttgaagaaagtttagaaatttgtgatgggctgcattcagaaaagctgtcctgggttgaatacactctgccacccatgggttggacaaactaggtataaagtaattatctttaaagtcatttacttattttttagattgaaatataatattgagtgtatttgtcatgtatcacatgataaaggaatctctctggatcccacttctctcttgaattacatgaatctttgcaatttaaagaatataagtaaaaaaatacaattaagagatgacttcattcagaaataagtatcaaattttagtgcttaaaaataaccaaggtggagggtgggggcagtggctcatgcctgtaatctcagcactttgggaggctgaggcaggtggattacctgaggtcaagagtttgtgaccagcctggccaacatggagaaaccccatctctactaaaacatacaaaaattctctgggtatggtggcaggtgcctgtaatcccagctaattgggaggctgaggaggctgaggaagaagaatcgcttgaacccaggaggcacaggttgtggtgagccaagaccacccagctgcactccagcctgggcaacaagaggaaactccatctcaaaacaataaataaataaatatttagatatttgtgttacattatttgtaatatataaaaaaagagtccacactgtatgatggaagaatgagaaaaatataagaaaaaagtcttaaagttatagatgaaaatatgacataaagatatgtttatatctatgcaaaactgagagtggacagctgctataataataatacctgggttatattccaacaaaaataatcacagatggttgtttagcccaagtttctaaaatcagtgttcactttgctgctgacacagcgtacgtcacgtcagattttcaaagtcaaaaagaatttgcataacaaagtctttttggaattatgattaaaactgtgagaattgaatttagttaaaaatacaacaccggccaggcacagtagctcacgcctgtaatcccagcactttgggaggccgaggtgggaggatcacgaggtcaatagatcgagaccatcctggccaacatggtgaaaccccatctgtactaaaaatacaaaaattagctgagcatgatggcatacacctgtagtcccagctactagggagactgaggcaggagaattacttgaacccaggaggcgaaagttgcagtgagccgagatggctccactgcactccagcctagcgacagagcgagactccatcctccccaccaaaaaaagcccaccaaataaccagtaacaagagttcaccttcatattttagagcattgcacctaaagcaatcagtagcaaccttggaaatcctcatggaaaacaatataaatgtcctggaatgtatggccaccaccacaaaaggcacacatactattttacaagcactagatttacaagtattgggggagaaaataaattcaaaatgtaactcagaccaatccacacaccaagactcagttttgtgcaaataaaacctctttagaaagcagcctttgacctctgtagcacttttgtcttcagcctcacagtggaggtgagtacagcctgggctcctggaagggatgcactgtccctgaggagcctctgtctgaaaaggagtaggagctctgggcacaatggttaaagatgcggatcaaatgtacaagaaggataaaggccatcttgtcattgaccaggaactcatcccccatcttgggcactcttgtcacacctgacaactatctggttgtaggttatcagtagtgggctcctacctagattaggtccaatggggccagtaaaagcttcggttctgacagtcgatagccatgagcaagagtgaaagtagaaaatgcaatgaggaaaatgtatccaagtcttcaaaggtgaggtagggaaagagagtttaactgatctatgaaaatgcagccaggtaaaggggaaacaattccaacaaagattctcaacacatttcctccttcatagcctcaaaagaaacaatagattctttgattggaggcattcatgtggggtgattctgcctggatgcagtggttgctccccatcactagacttccaaatcccttcctaagaatctggtgcatgccagtcagaacaaatattctcatctccataaagcaccctctcctgagtgtagtggagaggttttataatgtgagggtgaaaactttcaaagtagaaacctgtcatttctttatatttggacaatcataagcactttaagaccctttctggtttgggtaaatcagtgatctgcacaagacacgctttacaaaacccagcttcctgtccttgcttctgggccgctccttccttcttgagttctcagggttcctcatggtcaatcctggctgcaaaacatgagaaacaaatgatggcaggaaggcaggaagaacctcatagacaagcagagtgggaggctccacagccccctctcagcaattcatgtactaagcaacaaaacaccagtaggatgtagaaggtccgaatagtaagccatttccatcacttccatgtagccatccatccatcatccttgtatattgggaataaatgttggagatacattcattttaagcacacatggtacatttacaaaaattaaccctacttattttgttcatcaagcaaatctcaatcatttcagagaaatcaaatcacatagcatgtttctgatcatataattatgctagaagtcaatgataaaaagctaaccacaaattctcatatgcttggaaattccaacgcccttataagtaagacacaaacataagaaataatccaaaatgaaacaagactgcctttgcactcaatgataagatcataatatggcaataaaatgtctccatctggcctgggaattccactttgtggcacaaggttgtgtggtcttaaatcatccctaatccacctagacactttaacatctgaaacggggtaatgatgtcacttatctatgtcatcttactgcctgtgagcatggactttaagctttgaaccctaatgagggaaagaaaaccaagttgactctcacgattgacctcccagggatgtccaaggaatctgtgtatttcaagagacaaagttcatcagcttctctcctggaggatttggccacaatacccagagggcttggcagcaccaggagtgatggatggggagtgtcaagcaggtgggcaggacccaggggcctggtgaccaggagagacaccccaactggccatcagctttgctggccttgtcctcagctaaacttcccagaggccttcttctgcctgatgacacagagtgtgcccaaactcactcagtcctctggcagcctaaaaccactgctttaaatcccttcagcatttatgatgacacaaggttattgtaaacaagaaatattctatcaccgttgtaaatggaaagccaatgcctttaccataaataaaaagaaaccctaagaaacaagcaaaacaaaacaaaaacagggacaacaaaacaatggaattaaattctatttgtgtgctgtcacctgcataaagacccccagatttgagttgtcttggttgtaaaaggaaagaccaagtaaggggagttgaagtcagattagcccgaaagtgaatgggagacctgtgatgtccatgaagtgttgtggggtcaccttgattatagcccaagcagagagagggaaaggaaggagaagcgaacagagtttgggccctcagacaaggagaagtcattcatgtaaccaggaaacacctcccgaaagccagagtcaaactcccttgcaggcgggcccctcatggtcccttggaggcttggccaggggcccttggcaggacgaggcaccttgggagaccagctgtgcaacgctgggctggattccttctgtacaactggagtgctaatggctgtgtgcaaagactatcagaagacagcaggaagtggttgcgcagctgtgtacctgagcattgtaacctcccaggggcatctttcttcccagaaccggcaccctgggaggtccttggccactaaaggcagtgatgatgacaacagcagcccctcttgtcgccattgtgctaagcatagcacttcgcaggcatcatctcctgagatcctgaagtactatcactgttcctttgcacagatggggatgtaggttcagagtggttgggggagggggtgtatccaggcagagaaacagatctgggggaacttgattatcggaggggacattaggagaaggggaacctgggtctggagactccccaggaagatgcggccacagagatgctttgcccaggacccagcattgccctggtcagtcctgctcagatgaggtccaaccaggtggctgtgttcccagcccagcacctccatctatgagtgagggtcagtcacagctgtggtgatggggatatatcatagcatgttcctcatagcattattgtgacgcagagagtgccagcccactcaggcacagggcatggttctgggggcacatctgtctttctctcttgacctctagatctactaagcaccacgcaacacccccactctaatcatacccagacagggtactgggcccaaccttgtgctcctgttcccagagtcacccaaccctggcctgtctctgacatctccgggcccaggcacagcccttctataggccctggaaggggcacatccccagccctgggtttgaaacctggaaaatactttcttccaagagagctcaggagggccaggtcatgcctgggtctgttctgtccgctggtcccaggattgccctctggagtgccacctctggttgtactgtgggctggggtctgggagtgtgtgcatgtttgggtgcgtaaatctgcatatattcatctgtgcatctgagtgtctgtgtctgtgattatgtctctgtgtagctgtctcagggtggctctgtgtttttctctatctttgtatgcatttgggtgtcctttctttctgaatgagtgtgtgttggttgtgcaaatctgtgtttgtgtttctgattgggtaatgtgtgtctctggcatgtgtgccccctgtgggagtgtctgtgtatacctggcttctgtatctttgtgtatgtgttgaggtgtgtgcgtgtgaatttgcttctcctttgggtgtccctgattgtgtttgtatttgtgtgtttatgttttgtgtagtgtgtgtgttctatgtctgattctctgcctgtgggtctgtgccagtgtgtgtgtgtgtgtgtgtgtatgtgagcacgtgtgcacacacgtgggtgtccactgtgtgtagagtcagccctgtggggctgtgtctcatggttctgtgtgtgtatctgtgtcctcctggtgtgtgtgtttatgtgcctgtccgtgggccatactcctgagtgcccaggtgaagctggggcggttctgtgcctctgtgtctctgtgcttgcggtatctgtttatctccctgtgagtttctgggtttgtgcacctcggaagttggcagtcacagagaggcctctccagtgctgacctccaggggtggctgagaaggggacagcatgtgcttctctcatcccccggcagggccttttctgctcctgcttttctgagcctctggtggccccctggtggtccctcttaggccccaaggagggatggcatgaagggtcaggtcacaggactccaggccagggttgtgaggaggactctgggtcgccggagagagttatattgaaagaaggaagattgtctgtggggggaggattctgggctggagggagcctgggccctgggagggtgaatgagtgaggtcctctaggaagggctcggggacagagctcctgggccacttggaaggtctgatgtgtaggtgactacaggggatagctaggggcagggctagaggagtgctgggtgcccagaggctgaggccctcactcacacatgccaggtttaggctggggcacatgtgcacatgggcactattgggggacacaaaggaccattgggtgggggaggcagcggtggtctggcaggcaaatatagtccccaagccaaggctgaccacccaggacatctgccctgccccggccttcctggggcctcactccagggcacaggcacgtgcccggtgccacatggggcacacctcctggacccctgtgtcttggccattgaagggtgcttagggctaccctgagaaactggtgccaggagggagaatctggtctcaagatatttcaggttgtggattagggagaactacagaaggagggcatttaacataggttcattcccagaacaaatgcttcacacagggtattgtcgaaattaatattttattacctggaactccaatctgtgtactcacctaggaaattctaaagacacagagaggacttggaggaagcagagtaactgaatgtaacttaaaataacaaaaacagtccgggtgcggtggctcacgcctgaaatcccagcattttgaaatgctgaggtgggtggatcacctgaggacggtagttcaagaccagcctggccaacacggtgaaactctatttctactaaaaatacaaaaattagctgggtgtggtggcgggcacctgcagtcccagctactcaggaggctgagatgggagaagggcttgaactcgggaggcggaggttgcagtgagccaggatcacgccactgcactccagcctgggcaacaagaatgaagttctgtctcaaaaaaaaaaaaaaaaaaaaaagaaaagaaaagaaagaaaaagaaaagaaaaacattggaattgtggcactcctgatgcttttccaaatcaaccctctcaatgtctcatcatcacccgccctagtggggagactgaagtggccagggatttgccgaaggtgccagttggttccgagttcactgctgattacatctgaccaagctccttttctcaagttcaccttgtttaatctttccagtgacagttttcggcagctccgggacaaactccatctggttaagtataagggaaatccacagcgacttaccaattccctaccctcctcctctgcccctccacagtctcccacacaggctgacaccatatggtggccttaatggaatccaccgagtgtgtcaggttctccccttgaccctttgaaggtggatgtagccgtgtgatgtgactcaggagctgtgagtggaagtgaagcgtgtcacttcaagacagaagagttgggagccactgagactgggcaccctctcctccatctcttagagaagctgacaggtggaggctgctccttttatcctgttggtggatgaggggatgtgaagcacaaggcccagcagagccatggtggacgtgccgcatgagcaggataagaaccttcagtgttgtaaatttccattgtctggggctgtccactgaacctacagtgatatctggcccatagtagcaggcatgcaccatctatttcatgctctgtgaagcaggctagcctaccctcagaacatgaacttgttgtcagacacacataggtttcagtttcagccctgcctcttaatgactgcaacctcgggcatttgactttgagtctccgagcctcagttttgtttttgtaaaatggtttgctatgctatctcaggtggaggagaggatttaatgaaataaaaatccatgtaaagcattgagcctaggggctggcacacacagtgagtactcaatcaatgttagccatgtagcttcataatgtgtattgactgtcaatactcagacactgcagcaaagtattacaaagaaggaagtgttaactttttggcatatgtatctctttgcactttattttcaaacgggtaggataataccacgtatactttttcatagtacgcttttttctcttaatatgtgttgagatatatgttaaatatataaaaaactgaatcattattttaaattgcagggttatattcaattttatgaaaaccttatttctctattgtttgactttttgtaggttgcacaaggcattgaattaaaataaacatatcagaatgcattgcatttataaagataaatatcattctattaatttttgtttgttatatgtatgtatatatattttgagttgcaaaacagaacatatttcttcctatgaatcatgttagaaaaagtttggaagctgctgatttggatttttttttaatttttacaggattataaataacctttttaaaaatatccttgggcacttgactgatttttgtctttaggttaacatgccagcaatgattccttttgggtttctgacacaagatagcaatttccatccaaataaatcaactatgccatcccatccctaaaccaaattccttcttctgcagaagaaaaagccagtactgtgactgcctaagctttcccctgcacagccaccctatgagacatggggcaggagcactgggagctattcaggagcaccagaccccttccatctgccctcactcaccttccttggggacttgcatgagactgtcactgactttacatgcttctgcagctccttggtcagctggtccttgtcacgggacagaaactgtggggtcaggacaatcaacaccttcacgacctgcagaacgagggcagaggcttatggtgagtgtcaatctattacatagcttaaaaagtcaatattggtggggtgcagtggctcacacctgtaatcccagcactttggggggctgaggtgggcagatcactggaagtcaggagtttgagacaagcttggctaacatggtaaaacccgatctctaccaaaaatacaaaaattgactgggtgtggtggtgcacacctgtagtcccggctacttgggaggctgagatgggagaattgcttgagcccaagaggcagaggttgcatgagctgagatcgtaccattgcaccccattctgggctacaagagtgaaactctgtctcaaaaaaataaaataaaataacaagaaaatatagagaatttcaccaaatacctggactttattttttaaggattaaaaaggatatagaattgagaaaataacagaaattgaaaacccaatagatggatttatcagcaaattagacaaaacagaagagaggattaaagaagtggaagttaggttagtacaaaacactgaaattgaaggttagagagagagaaaacgatgggaaatataggaaagttaacaagagacatggaacatgtcagacaggtctaacttgtgaggaattagagtcccagaaccagaaaggaagtggaacagtacctctatttaaagagaaaatggggttgggtacagtggttcacacctgtaatcccagcactttgggaggccgaggcgggcagatcacttgaggtcaggagtttgagaccagactggaccagactgagaccagtttctacctcctccataacaggaggtagagagcacctctacaaaaaatacaaaaattatccgggcatggtggtgggtgcctgtagttccagctactctggaggctgaggcaggagaattgcttgaacctgggaggcgaaggttgcagtgagccaagactgcaccactgcactccagtctggatgacagagtgagactctgtctcaaaaaacataaataggccgggcacggtggctcatgcctgtaatcccagcactgtgggaggccgagccaggtggatcacaaggtcaggagatcgaacccttcctggctaacacggggaagccccgtctctactataaatacaaaaaattagctgggtgtggtggtgggcgcctgtagtcccagctatttgggaggctgaggcaggagaatggcatgaacccagaaggcgatgtttgcagtgagccaagatcgcaccactgcactccagcctgggtgacagagtgagactccgtctcaacaacaacaacaacaacaacaacaacaacaacaaaataaattaaaaaataaaaataaaaataaaaataaaaggaaattttaaaaaagagaaaatgttcccccacaaatctcaaaacaaataaaagacattaattcacagacaggaatgtctgcaaatcctaagcaggtgaatagaaaaaaagtcgtgattaaattgctaaaaaaaagataaaaggagacattcaaaagaagccagaggaaaaaaagacatattactttcaaagaaacaacaataagtaggagaaggacttttcatcagaaactacagaagccagaaacccacggaatgacatttttcatgttgaaatgaaaaaaatctgccaacataaaattctacccactgaaatatacttcaaaaataaaagcgtaggtttctagaaaatggcagcaatgacgatgacgtcacttttaaatctcccctcatcatcacacaccaacggagtaactagatgacaaaaccaaaaactcatggacaatacaacacaactacatgataaaatcctagcagaaacaaaacaagacttccagcaagactcatcaggaaaaaagacataatgtccaattttgagaacaaaaagaagatgtcaattaaatcctacagatattaaaaataaaagaatattataaacaacttcatgtcaataaacttgacagctagatgaaactgacaaatttcctcaaaagacacaaattacaaaatccaaattatcctatatctattaaagaaattaaggcaaagagaatctacagctaagttattagaatggataagaatatttaggcctggtgcagtggctcatgtctgtaatcccagcactttgggagtccgaggtgggaggattgcttgagcttaggagttcgagaccagcctgggcaacatggtgaaagaccatctcaaattttttttttttaaaagaatggataagaatattcagcaagaatgtgggatacaaaatataaaaatcattcgcacttctagcagccacaaacagaaaggacaaattttaaaaagataccatttatggttacaataaaggatacaaaatgcctaaaaataaatttaacaaaagatgtgtaagtggaaaaaattatatatctttatgaaagctattaaagaggccaggcatggtgactcacacctataatcccagcacttcaggaggccgaggcaggtggatcacctgaggtcaggaattcgagtccagcgtggccaacttggggaaaccccgtatctactaaaaatacaaaagtagctgggcatggtggcatgtgcctgtaatcttagctactggggaggctgaggcaggagaacctcttagaacctggaaggcagaggttgcagtgagccgaggtcgtgccattgcactttagcctgggcaacagaatgcgactgtgtctcaaaaacaaaacaaaaacaaaaacaacaagaacaagagaaaaacattaaagaagtcttaggcaaaagagacacaggccatattccagcttttatttgaagttcaggagtacatgtgcaggtttgttatataggtaaactctcgtcatgggagtttgctgcacagattatttcatcacccaggtattaagcccagtacccactagttattttttctgctcctctccctcttcccaccctccatcttcccataggccccagagtctgttgttcccctctatgcatccatgtgtgctcattatttgtctctcacttatacatgagaacatgtagtatttggttttctgttcctgcattagtttgaaaaggatagggccatattcatagattgggatattcagtcttttgaagatgtcagtctcccaactgatttatagctacaacatgtactataattcaaacaaatcctaacagcttttttttttttttttttttttttgatacggagtcttgctctgtggcccaggatataatgcaaaggtgtgatctcagctcactgcaatctacgcctcccaggttcaagtgattctcctgtctcctgcctcagtctccctagtagttggcagtacaggcttacgccaccacgcccagctaatttttgcatttttagtagagacaggatttccccattttggccaggctggtctcaaactcctgacctcaggtgatccatccgcctcagcctcccaaagtgctgggattacaggagtgagcctgtaatgaaatttgataatctattttaaatcttatttgaaaaagccaaaagccaagatactcttgaagaataagatgaggaagttactttagcagacatctagcagataactaggaagctacagtaattaaggcagactggtttacacaattacaccgtgatagacaagttaaataatgacacaaaataaagaggccagaaaccaactctcctttacatagaaattggattcatgactgaattgtaactgcagatctgtgaagaaatgatgagctcttcaataagtagttccaggaaaaattgttatcattatgggggaaaagagaaaccagagctctacctcataccatagaaaaaatttgatttggaatacttaaatgtgaaaaattaaactgtaaaaattttagaagaaaatatcaattatgagaatgattttttttttttgagacagaatctccgtccgtcacccaggctggggtgcggtggtgtgatcttggctcactgcaacctctgcctcctggattcaagtgattctcctgcctaggcctcccaagtagctgggattacaggcacccaccaccatacctggccaatttttgtatttttagtggagatggggtttcaccatgttggccaggctggtcttgaactcctgacctcaagtgatacacccagctcagcctcccaaagtgctgggattacaggcatgagccactgcgcccagccttccaagaatgatttttttaagctcagaaagtgaaataaatacagaaaaatgctgatgaatacaactactatgtttgtttgccagtgctacacaaccaatcctcaaatttagcagcttaaagccatctgttagcttgtggatctgtaggccagaggcccaggcgtggtgtggctgagctttccacttggggtcttgccagcttcaatcaaggtgccagcagggctgtgttctcacctggagccctgagtcctctttcacgctcacatccttgtgacaggttcatctccctaaagttgtaggatggaggtctcggggtccttgtctgggtccttgtcggctatcaggcaggacctgctcttagttcctggagggcatctgcacgtagcttcctccatcttcaaagtcagccttggccaggcacagtgactcactcaccgcctgtaatcccagcactttgggaggccaaggcatgtggatcacttgaggtcaggagtttgagaccagcctagccaacatggcgaaactctgtctctacaaaaaaatacaaaaattagctgggagtggtggtacttgcctatagtcccagctacgcaggaggctgaggcacgagaatcacttgaacctgggaggcagaggttgcagtgagtggagattgcaccagtgcactccagcctgggccacagagtgagaccctgtctcaaaaacaaacaaacaaacaaacaaaaaactaaaaacaccagccagatttgcttgccaagtttttcctgcaatttgaaactctctgaagttttctgtctctggtccctagaccccagattgaagggatcatgtgatgaggttgggcccacctaggtaatctccctcttgattaactcatatgcaaccaattagtaatcctagttacacctgcaaaatttcttttgccatatatgcagcatgatcacagaagtgacatcctgctatatccacaggttctgtccactcttcagggggacatcttaaaagggtgagggtcgtgagaattctgcctaccacagttatattataattaaaaacttctattcttcaaatgacactataggaaggtaaaagggcaagctacagaatgggatgtaagatttacaatacacataattgataagggagttatttctaggatatatatttaattaatttatttagagatgatgtctcactctgtcacccgtgctggactgtagtagtgcaatcgtagctcactgtggttttgacctcctaggctcaagtgatcctccaacctccgcctcccaagtagcggggactacaggcacatgacacacgctcagctaatttttctattttttgtagagacgtgggtcccactatgttacccaggctagtctcggactcctgggttcaaataatcctctcgcctcagcctcccaaagtgctgggattacaggtatgagccactgcatctggcaaagaatatatattttaaatcttacatattaataagaaaaaagataatagaaaaagagacaaatgaaataaacatattttcacaaaaaaaacctcaaaatatcaacacttgtatgaatacatgtgtatttttttctttattttacttatttatttttttgagatggagtcttgctctgtggcccaggctggagagtgcagtggcgtgatctcgactcactgcaatctctgcttcctgggttcaagtgactctcttgcctcagcctcccgagtagctgagattacaggtgtatgctaccacactaagctaatttttgtatttttagtagagacagggtttcactatgttggccaggctggtctcaaactcctgatctcaggtgatctgcccatcttagcctcccaaagtgttgggattacaggcgtgaaccaccacacccggccatgtgtatttttaattgtggaaaaatttggtgtccagtgcttggtcttccctgctctgggaggcccaggtgactctgccacagcctgtgttactctgtgacctgcaggtactgggagatccacagggaagacactgggacatcctagaagctgggaaatgaaaagaagagtgaagaatgcaaccacacatggatggatggtcttttccataacataatgcctgcctctcaggctccaattccaaagcgaatcatttacagttaatttctgtctcctgggttgatcattctccctaaccatcacttgctgcccctcaaaggaattgtctacattccctatctcctccttaccctgtgaaaaagggtatgtcagcttctataccccattgggaggttgggaaatcactgactctcccctgccccatacattaattcatctgtatgccttttcttctattaaaaataagtgaaaactcagtaagacaccattttaccccactgtattagcaaacctttaaaaatctgacaatttcaagtctttccagtgaatcatagtgttactggtggcaaatccctagggggctgcagcaacctcaattcttgcctcctcagcagaaagaatttgaccaacagcataatacggcagaatgagagaccaaggcaagttttagagcagcagtgaaagtttattaaaaaactaggcctggctcggtggcacatgcctgtaatcctagcactttgggaagccgaggcgagcagatcacatgaggtcaggagtttcagaccagtctggccaacatgatgaaaccccaactcaactaaaaatacaaaaaaaaaaaaaaaaaaaaattagctgggcatggtggcaggtacctgtaatcccagctactcatgaggctgaggcaggagaatcacttgaacacaggaggcagagttcgcagtgagctgagatcgcgccgctgcactccagcctgggcaacagagcaagactccctctcaaaacaacaacaacaacaacaacaacaaactttagagcgggactaagaggaagtaaagtacacttggaagagggccagggggcgacttgagagatcaagtgcactgtttgacctttgacttggggttttatctgttgacatagttccagggttgtacatcccttctcccctgattcttccctgggagtgggctgtccacgtgtgcagtggtctgtccacgtgtgcagtggtctgctagcagttgggcggtgagcacgcagtgtgtttactggagttgtgtgcatgctcacttgaggcattcttcccctaccaggtgaatgtccctagaagttaaactccaccattttgcctcttagtgtgcatgcttgagcccactcgcccaactcctgagatcttatcgggaagctgctgatcaccagtttcaagtttgttctatctattaggagatggcctttccctggtgcaggctgcgacccattattagagacagtttaacaatcgcctggtggttggtgacattactggtgggggggtgggggtcgagccctctcctgccctgctcatgcctgactagctacctgtaacaataggaactcacatacttttgacacgagtttaaattagtgcaacctctttggataacaaatcgtgatgatctataaagttggaaatgtacaccctctacaatccaagagtttcatccctgggtatgtaattgacagaaatgcatgcatggctggttatagtggcttatgcctgtaatctcagaactttaggaggctgaggcgggaggattgcttgatcccaggagttcgaaaccagcctgggcaacatggcaaaatcttgcctctacaaaaagatatgaaaattagtcaggcatggtggtacatgcttgtagtctcagctactcaagaggctgagaggggaggagcaattgaacccagaaggtcaaagctgcaaggagctgtgatcatgccactgcacccctgcctgggtgacagtctcagggtcttttgagacagaccctgtctcaaaaacaaaaaaaaaaaaaaaaaaaaaagaagaagaagaagaggaagaaatgcatgcacatggatgtccaagccagaaaaacaaataaacctggagacaatgggaaataatttaaatgtccatcaacagtagaatgttgtaaacaaaatatacaataatgtgtaaataaattatagaatactttaaaggtaattacatggttccatttcttaaagttggtggatcctacaacacaggtgtttgtttcactcttccttcaagaagtctttccaactcctctgtcccttcccttgaccagaagtcagaggcggacaggcacttaaagatcaggaacttacccctcggcttcacaaacaaggggacgagggaaggagacacatgtcaggacttctcttgaaaccctcctctttgtctgcataggatgccctcctcttttccttctcagtaactgtctgtcaacatcctcttcatcttttaaggcccttccttgggatccttagagggcaccctggtccatctacctgttgagaaaactgaagttcagagaggttgaagggtgaacttaaggcatgcagtcattgagaggcagccttggctctctggaatctgtgctctctttatcagcaacatccagtgctaatttatgtctgtacccatggcacacttgaagacagttccttataaacaggaggtgctcagtaaatgccacctcctccctccgggtctttactgagtttaaacaagagctttcaatgaaataaaagaggatacaaacaaatggaagaacattccatgctcatgggtaggaagaatcaatatcgtgaaaatggccatactgcccaaggtaatttatagattcaatgccatccccatcaagctaccaatgactttcttcacagaattggaaaaaactactttaaagttcatatggaaccaaaaaagagcccacatcgccaagtcaatcctaagccaaaagaacaaagctggaggcatcatgctacctgacttcaaactatactacaaggctacagtaaccaaaacagcatggtactggtaccgaaacagagatatagatcaatggaacagaacagagccctcagaaataatgccacgtatctacaactatttgatctttgacaaacctgagaaaaacaagcaatggggaaaggattccctatttaataaatggtgctgggaaaactggctagccatatgtagaaagctgaaactggatcccttccttacaccttatacaaaaattatttcaagatggattaaagacttaaacgttagacctaaaaccataaaaaccctagaagaaaacttaggcattaccattcaggacatagacatgggcaaggacttcatgtctaaaacaccaaaagcaatggcaacaaaagccaaaattgacaaatgggatctaattaaactaaagagcttctgcgcagcaaaacaaactaccatcagagtgaacaggcaacctacaaaatgggagaaaattttcgcaacctactcatctgactaatatccagaatctacaatgaactcaaacaaatttacaagaaaaaacaaacaaccccatcaaaaagtgggcgaaggacatgaacagacacttctcaaaagaagacatttatgcagccaaaaaacacatgaaaaaatgctcaccatcactggccatcagagaaatgcaaatcaaaaccacaatgagataccatctcacaccagttagaatggcgatcattaaaaagtcaggaaacaacaggtgctggagaggatgtggagaaataggaacacttttacactgttggtgggactgtaaactagttcaaccattgtggaagtcagtgtggcgattcctcagggatctagaactagaaataccatttgacccagccatcccattactgggtatacacccaaaggactataaatcatgctgctataaagacacatgcacacgtatgtttattgcggcactattcacaacagcaaagacttggaaccaacccaaatgtccaacaatgatagactggattaagaaaatgtggcatatatacaccatggaatactatgcagccataaaaaatgatgagttcatgtcctttgtagggacatggatgaaattggaaatcatcattctcagtaaactatcacaaggacaaaaaaccaaacgccgcatgttctcactcataggtgggaattgaacaatgagaacacatggacacaggaaggggaacatcacactctggggactgttgtggggtcgggggagggggaagagatagcattaggagatatacctaatgctaaatgacgagttaatgggtgcagcacaccagcatggcacatgtatacatatgtaactaacctgcacaatgtgcacatgtaccctaaaacttaaagtataataataataataaaaaaataaaaaatcagagctttataaaactgtttactttgatgctgctaacctagaaaatgaccggcagatggcagcatttagctttcctagctttcaactttgcaattgccggtttaaggcgagaaaagttggtttttcttttccattctccgaactctgcttgttgtcaatgcctgccaaatgcccactgctcccattggaagcctcatcctactacccccttgctgaaaaagcatcttgagcatctgcagaagctccagtttgagacctggtggcaggagggggtacatggacatgcaatgagaatatgaacgctttttttttttttttttttttttgagatggagtctcactctgtcacccaggctggagtaaactggcgcaatctcagctcactgcaacctctgcctcgtgagttcaagcgattcttctgcctcagcctcctgcttagctgagattacaggcgcctgccactgtgcctggctaatttttgtatttttagtagagatgaggttttaccatgttggccaggctggtcttgaactcctgacgctcaggtgatccgcccaccttggactcccaaagtgctgggattacaggcgtgagccaccgtgactggccagacatgaaagcttttcctctccacagagcccagtgaaatgctgattctcaccacagccctgggataccatgggctgcaaagccatcttagggctctgcttttcagctggggaaacagactccaaaaggcaaagtgatgagctcaaattcacaacaagttcagattttctgatttgcaactctgtgcactttcctgcgttagttctctaaggtgagatctaccctgaaggcatgttctgcctatatgtgtggaaaggaggccagaaagatttttaaaaaccaaaatgctacatggtaaataataaaggaacagcagagaaaagagtgttggggctcagaggagcagactgcaccattcagggctggggtgggtgagaaattaccaagtcagaaaagagctgttgaaaacaggggagctctcacccttaaaaacagtcaagacatgcacaagaaaaggagcaatggtggaaattctagatcaggatggcaaacgtatggcttggggctgctactctctttcaccctaccctgtcacgcggcccccatgtccatgacagacatcagtaatcaatcatgggattctttccccttgagctcagggcctgaccagaatccattgtgcacagtgcgccaggcttcctctaccaactcgtgggagatgtcaccagagaaagcctgttgctcctcctcatcctgccctattgcctccctcgtggccacaatttattgtgcacttactgtgttggaggagttgtgctgagctctttacacacaccttccatttaattcacttaccatattctcgggagttaggcatccttctggttttacacataaggaaaatggggcacagaggtgttaaaagcctcataatggcagagccaggattcaaatccaagcccacctgtctccaaagcccagcctgggaaactgctagataggtgggataagccagtatggaagcaggcctgtggtttgggccttgtttaggcctgaagatcaagactaactaggctgcagtggagcctgaggtccagagaacagaggacactaaagatgcttttttttgttcattcattcctgaacccacgtttattaagtccctgctacatgccagacaccttgtagatcctgggggtatagtggtcaaacaagagagacagaacaccccaccctcaatcaggggagactaacaagccagtcaaatgcattatatgtcaggtgatgtatgtgctaaggggaaaaatgaaggctagagagtagtggagagagccacatagagctatatgtggactcaggcctaggagataagggaagggatgacttaggggcctgagcttcttggagtgactgatgcatatcgagataaaggccctaagaagatgggtcctgatgctctcagggaaaataacgatgttggggggtgtctgtggttggggaggaaggagggattgccaggaacacatggagttccaggggccttcttcactctgacaatgacaatgcggccgagggagggggagtcttacccagaatactcttagctcctggactttctccttactctggtagatgtgggatggaggcagaaagtcccactcatgcgtcctacattttttgagaatctaacgaaataaatttcgccaggtgcagtgactcaagcctgtaatcccagcactttgggaggccgaggcaggtgggtcacctgaggtcaggagtttgagactagcccggccaacatggtgaaaccccatctctactaaaaatacaaaaattagctgggcatggcctgtagttctagctactcgggagcctgaggcaagagaattgcttgactctgggaggcggaggtttcagtgagccaagatcactccactgcactccagcctgggcaacacagtgagactctgtttcaaaatacaatacaatacaatacaatacaatacaatacaatacaatacaatacaatacaatacagtacagtacagtacagtacagtacagtacagtacagtacagtacaataaaagcatgacatgttaaaaaaaaaaaaaaaaaaaaaaaagaccgggcttggtggctcctgcctgtaatcccagcactttgggaggccgaggcaggttggtcacctgaggtcaggagttcaagaccagcctgacctacatggtgaaacctcatctctactaaaaatacaaaaattagctgggtgtggcggcaggagagcctgcaatccgagctactcaggaggctgaggtaggagaattgcttgaacccaggaggcggaggttgcagtgagctgagatggtgccactgtacttcagcctgggtgacaagagcgaaactccatctcaaaaataaataagaaaaataaataaataaatttcattcctctgcccactgccagtatccagtcccgctgatgaggctggggtgaggtggggggtaactttttagcacctgggcccttacgtccagcagggctgtgaacagggactttttgtgccagtaacagtagaaaatacggcaactggtgtttgccactatcaaagaggaacttggagttttgttgaaggagcaaaattgtaaccacccaaggggttcaccttgcctgctgcctcgacagagccgattgatcaagacaggggaattgcaatagaagaagagtaattcacgcagagccggctgtgcgggagactggagttttattatcactcaaatcagtctcctcgagaattcggggagcagaatttttaagcataacttggtagggggaagccagtgagccaggagtgctggttggtcagggatgaaatcacagggagtcgaagctgtcttcttgcgcttcgtcagttcccgggtgggggccacaagatcagacgaggcagtttatccatctgtgtggcgtcagctgatccagcaagtgcggggtctgcaacatgtctcaagcactgatcttagaagcagtttagggagggtcagaatcttgtagcctccagctgcgtgactcctaaaccgtaatttctaatcctgtggctaatgttagtctagtccccagacaagaaggaggtctgcattgggaaagggctgttaccatctttgtttaaactataactacaaactaagtttctcccaaagttagttcagcctacgcccaggaatgaacaaagacagcttggaggttagaaacaagatggagctggttaagttagctctctttcactgtttcagtcataattttgcaaaggtggtttcaaaatgactatccatgagtttgtaaaataacccaggatgcctgttgttcacagcacatagcctgctgtgtgactaagctgataatcagctagactttggggagagaaaaatgccaaaagaaaatggccttgccctgctagagagtcttcaggtctccctttggatgcatgagcaatatggaagggaatggagaaggaggacaaagaaaagtcaccctccataattgggacagggtttggaactcttgcggccaattctttcatgctgcctggccccacctgccccggagacttctggtgcttaacggaggctttcttttggctgccctggaactgtgaatgggcctgccttggataattttccctccaggcgctctctacctggggtctgtgaacaccctcgaagtagtatccaccatgaattgtatgaataattacacatatgtgcacactcatgaatacatggacccatgcatatgtgttcacggcgttctacaattgcccccatgatatctataccagttacaacttattacttctcagctccatattcacccactaatacctgctctgtgataatggacaggattcccatgagcatttctcctgtacactaagcataacgtgaagctttctcagcggagggtgctgagagaacagtgcaggtgaaaggagtttctcttcctgggtctggctggtgtgaggagatccagtggtactctgctccagtcacgtgcccagaaggtcccaggcaactagtcttgtcctggcatggtgatcgccctcttagtatcctcccaacacaggcaccacgcgatccatgccttctgtccgcactggagacccaatcattctacatgctcatacactcaacccagcagtgtggctcgcatgggctgtggaggtttgtttcctgcttgtccaataattgcaaccagctctagaccatgcaacccagcaaatctctctgccatgtagggggctgcaatgataccttctccgacaatgtctgatctccagcctggggagggggccccattccaagcttgtccttcttgggtactcttctccacctgtagggagagtagccctataaggttctctttatatcatatagttgctcttttatcatagctgaataattctttatattaaacttccattgcataaaccacttgtggtttctatctcttgattgaaaccagtctgatacagtacttgtggcccccaaaatattgagatccaccatacctagtcccaggtaaaacaaaaatataaaaactctcagctcattgcctagaacatagaacacaatccttttaagcagctgttactaccatgtgttggagatggaggtcagttgccgcatagggttggcagctctgcagaatcaccttagacattccctcttgcctgtttagcttgagctgcattctctctggtatagcagtaaaataacaagtggctaaagctatcacttatggagcacacagttcatctcaagcagtgggccatgagttttgtatgcactattttccccattttgcagttgtaaaagatgaggattaatgaagttggaaacttgccgaagttttcacagttgaccctggaagagctggaatttgaacccaggtgtatccaattccaaaaaaccgaagtcttcaccaccacaatacatgcctttgtagcatttatttctgggtcaagctctgtgctaaatggttcacagtggttatgtaatgtgtttcctgtcacagctgtgtttgtaagcagtgttttgttcctgttttatagataaagagactaaatgtctcacccaaggcctctcagttagtgagaggtggaggcaggatttgaaactggttccctgactccagagcccacactgctaatgtctattatactgcttccctggctcacataatagaagtgaattttggggtgtgaatatacctacccctggggactgtgatgggtgaaacaatggaaagcacatggcatttgattcacatgcagttcctgctgctcccaacaatgccatccatgtgtgttaataaaggatacagagctggtgaggagaagggtgtaggtataggaccaggtgtgccatgtcatcacgctaacgtacctaaccctaaccccagccctaaccctcaggggcagtgatggcctacaggcacctgcattagggtggtttggaggatccatgttcatcgccaaccctcctctagggagagggttccctgacactcaacatctggatctgcccatggcagatcgagccactacggcatcttgcctataccccaggctctgatgccacctcactgactgtgccaacccgagtgattagccctctttgtgtggactcatggttgttcactggtttggctctaagaccctagctgctgatggggagagggatatatgacacattgtgagatccagaatatttgcaggtttctaagaaaaagcacaactattccagatactgaggaccaaagagcatattctcctctaggtgttcatagagaggcttcatagggaagccacatcctcaacaatatccctgcaacagatggggatcagtgttcaaaaccatgctttgtataatgtgtatcatgtccctcaaccaaagcacaaagcattaaaagtcattcttcaaggagtcagtgggaagcagtcaagctcacaggttcatggctctggctaaattggtaatagatttaagaatatttgtccagaggattgaatacagcatgcactctgcaggcacttatccatgagtagcatttctcttagccaagcttttgaaaagtatagtgtggctctgaggttgagattctacttggaatgctggaactttccattgccaattaagagacgagccatataccttaataacaaactgagccgtggcttgacatagatcctcttatgaaaactcatgcaccagaaagaacatttctctctttccctgctgccgccaagcgccaagcccacctttgtgtgcttgcatccaactgtgataagcctatgtatgtcaagttggtgaaggcccattgtgctgaacaccaaatcaacctaatcaagggtgatgacaacaagaaactaggggaatgggaaggcccctgtacaattgacagagaggggaaaccctgtaaagtggttggttgcagttgtgcagtagttaaggactatggaaggagtctcaggccaaggatgtcatcgaacagtacttcaaatgcaagaaatgaagaactaaatctttgcctcacacatggaaagaaaagaaaaaagaaaaagagagagagaaagaaggaaagaaagaaaagaaagaaagaaagaagaaagaaagaaagaagaaagaaagaaagaaagaaagaaagagaaagaaagaagaaagtcaacgtgtttctgaagagaaggccaacccacatcccctccaaagtgcatcaagggagtccctgcaggcagagccaagattctcttcaggaggaaatttgagagttccctaacagggcaatgaatgggtaactgattccctacaattccacatcataaaatgcaacggcaataaaaatagcccagaaaaaatgtaaagcaggcatgtaactatatatcttgtttggctacacatacacataagcatgtgcacacacacacatacctgcggcccatctaattttgagcaataagccctgttaaaactggttgtgaaatgtacacccaaagtaactaaatgatttattgtttatcattatttcctataaatctccctaaatttgggggatttccattaaaatgattatttcagatccagatttggtagcccttgtttctggatgtcattagatagcagtattcattgtctactaaaactactcctagtccatgatacccacatcaggttatttgcatctgagagaatgcttgaccttctgtgctccactgcagagcagggtggcggggccctaccatatgcaacaacctgcagggcacagatactgatcctttggagctgatgctggtcagtggcctgcactgtgcctaacagttatgtgggtcagtaggaaagcaaactcatgggctatctcaatatggtttcaagttaaaaataaaaggatccagggcacatctttgttttacccactggaaattacaagcaggatagttcatatttttccttatatattgtgtcaaaggctggaagaggatcaagaaaagtcacaagccatttaatatgatttttggcaggtgttgtcacaagattatataaattacaacagatgactatgttctcagcctgtgagctgtgaatataggtcaggcttgcaaattattaagcaaagccatgcaaatggacgttgcttgcacatgctagaataggacgactaactcattctggtttggcagagatttttcttattttagtacttgtcttaatccaataagtgttgctatagaagaatacctgaggctggggaatttataaagaaaagaggtttatttggctcacagttctgcaggctgggaagttcaaaaagtatggtgttagcatctgctcagattctggtgggggctttttgtgctatgtcataacatggtggaaaatctcaatggtgagtggacacgtgggaagagaaaaaacccaaggggcatcctggctttacaacaacccattcctgcaggaacattcccacaagaactaaatccagtctcatgagagagctggagtgcaccaagtcattcatgagggatctgtctctgtgacccaaacacctcccaccaggcacacctcccaacactgccacattggggatcaaagttcaacatgagttttgttggggacaaactcaaaccatagtagtactgactgtcccaaatcctgtgaaacccctgggtccctggcaaaccaggaaggttggtcacccttgctggaggccttcctcccaggtgatatcccttagctgtgtattcacatttgggggtgaggcacaaaacactgactgcaatgtctgtgggggagcggggcttgttgactgatggagctcaccacagagtgtctgagcatcaggtcagctcctcattgaggaaaccagcacacatcagccactggaggccctttgtgtgggacattccttttctccacaaatgaatcctccggactctggcctgtagattgtaaattaggttgctcactctctggggactggggtcccatcattcaatatgtagattgtggtttaatccttgtgtttaagcttgaccttacctcctcctcccaaacctgtgtggctcagacctcccattctgcagtttcttcggttcaatttatatgacaaataactctcctttctcccctgggtggaggggacccctggctgaagagggtagagaaagtggcctagggtttccacttatgcctctgttttcctgtttacagcctcacactgtacctcacctctttaagtgtggatcctttcttagactctgggggtgaagtagggagaatccgttggcttcttcttattttctccctctggggcatccaagtgagaacatgcaccattctgccaaattaccattcctttgtatactatctccaaaatacgtgtccaaattcttggttgctgttttctcctctcctgtctctattgtccttgaagaattttacctgtgctcttcctctactgccattttattaggatttggggagggagaggaaataaatttgtgttgcaaatcaaccatgtttcattggacatccatttctctagcagtctctctcttggtaacacccagtgggtggatgttggcacttctggaactatcttccatgtctattatcttttcttttcttttctactttctatttatttatccaagtctgctgttttcagggaggattccaatctttcagttcaccaattatctcttcagctgcatacattccactccatagctcatccactcaggtggttttatctgtttaaactatgaatatattttttgatttttattcccatgatcagtaatacaaaatgaacacattgttcacctctaacatccctaattgattcttttccatcctttcttatttgagaatattcattatacttacttcaaagcacattactggttgtctatttgttctgtttaatcttcagatctggagccagacagctgaggttaatctgtggcttcttatgttaagctatgtgactttggaagaagttacttaatcacgtgacacttcagtttcttcatttgtaaaatggcaataaaaatagtcctaccttaaactcttataaggtaggactcttgtaaggtattcatgtgtctattgcaaacataaaatagtcccactttatgtttgcaatagcgcctgacacataaatgctcagtaaatattagctatggttattatgtttcctcaggtggaagtctccctttcatggtggtacttctcaaatgatattttttgacagtggactcatctttacgcatgagattttctgcaagaaatctgctggcctagcttgctgtgagggagggctggaaatcgctggatgagcttgtgctccatgttgctttcaaggagagtgcagaacaggcagaggcactatcaggtggaccagctgtgctctcacagctggtctttgggatgtggctgctacttaactcttccttggctttaccagccatatggggccctgtcctgtctttcattcctaacacagttcataccaggagacagacactgctgtcctggtcatcttgtctgccggggtggggttgagggagatattcagggtcaattcatctagctccttccacggggatacttgtttaaccctctgtcagtagtcctttggtcctgtcttgttccaggcattcaccacctctgggcatggaatgccttgttgctgctcccactattgtaatatatactgtagtatatacacacaaggatacatgtagtatgtccttggctgctgctcatgagctgggctgcagtatcaaatcagatcctgtctgcctttggcttctcagaaacgtgtcagtgcttctgattctctgaacatttcctgttaactttctgagaacactgattttttccttctctgtcatttctggaggatgggcctgggtggagagatggcagcatgcgctcagtccactatcgtgaaaagggaagtcagaaaatgtatagaaaagataagaagtaagcagaatcttggggaatgagtaggagcagccaaagtgaaaagaggagaaaatgctgttgtaggctggggagacagcttgagcgaaggtgtacagatgggagaccacagggtagggtgaggggacacaagcaatgcgatgtttcaagagaggcaagacttgtaagaaagaagcagggcatgatagtcttatgtatcaggttaaggggcttcactttattctggagagcctctgatggtttaagaaagtgacataggctgggtgcagcggctcatgcctataatctcagcactttgggaggctgaggtgggagaatcgcttgagtccaggagttcaagaccagcctgggcaacatactgagactccatctcttaaaaaaaaaaaaaaaaggaaagaaagaaagtgacaaagtcagatatgcatcttatccactgtggaagttagatttgaggggtgtgagactagaaccaagaaaaccagttagaaagctcctgcagaagcccaggctggaaactacaagggcctgaaaattaccacagcagtatgtaagggatggagacaaggagtcagattcaacaaatattcaggaagcaaaatctatggataaggaggattttctaatactgttttctttaaatatcatagaaaggtacttcaaccttcttccactgtgaccatatgcttctttcttttctttttaattgcattttctccttaagtcggccatatgctttttaaaaatttgcagaagtaagctattttgactgcagatagttaatcccattggtactagcatgtaaatttttatgactatagtcaaagttgaaaatatttctatcaagtttcatatatgagctgtaagattactgggcattttaagttttctgcgcagtgtctaatcttagtacttttcaaattgatagaagcattatccagtttatcatggatggtcttgttgtaatagtggattgagttttatgttgtctttgtagatgttagtatttcatatcaagttataaaatttaatctttcttagtgtgcacatctagaacttgtggacttcattgggataaaatacatcagacaagctaagatgcaatcagatacagtgagatgcataagacatctcatttcacacaaaagcatacttctatttgcaatactcctctagttctgccttactacacaggagctctaacaaaatacatttactgaaattgctcaaaaaagacatatttatatgtgtgtgttataagtgtctatattgcactattgagtatgttctctacaggagagaacttccattttaaataggcatggatgtgaacaggctcacatgcttaaaactctatacatatgatgggggagagagttttccatagactagtttctggctccatacttgtttctcctccactgctgacatatttctgaaagcaggtgttggggaaatgtttattatttagatatcatctccgaccctgctggctgaatcagaacaatattcctggaagccattcctacgctggaagactagcagtaatgcaaccacacacagaagtgactgtaaactacataaagctgtctcatgccaagccagatcctaaaaatgcctatgaccactccaacatgaggggcacaaggagcaatgagatggaggggaaatcagagtggaaagagccagccatcttaactacagtcaagtgctgcacgaggacatttcagtcaatgacagaccatgtgggaccctgatggtcaggcaggggcacatgacaggcaggcggcaggggcaggaaggactagcagctcttccctggctagcagcgggggttctgcctccacctgcctccccaggacagaagccagatgagctggaccatgatggtcccttcagattatcataccatatttttcccgtaccttttctgtggttaggcatgtttagatagacaagtacttgccatggtgttacaattgcctagcatattctgtactgtaacacgctgcaatggcttgtagcctagaagcgataggctataccaggcagcctaggcatatagtaggctctaccatctagttctgtgtaagtacacctgatgacgtttgcacaacaacaaagtcacataaggatgcatttctcagaacacatccctgtcattaagcaatgcatgactgcatttgcacttaaaatcgcttacttttgcaaagtctgtaaaaacatattaccatgtcaaacattgttaaagcctctcccaccacggccttgtaaggagcccatgcaagcaagaggccctgcagtttcctggtgaatccatctctactgacagcatttgaaagatgattctggtagagagaaatacagttgctgtcagatctctagctggaatggcttgtcagaatgtggtaccccagtgggagacagaacccaggaaaaaaggtactagtaggctggtatttattgatacatctgtaattctagtaccaccctcctattaaagaaaattcaaacaatccaaaggaatgcagggaaagagaaaaaagaaacaacaagaaagcatattgtacatgatattcaaaatttcagtggtgtgacctgtttgctgactagttagaatctcggaaaaggtcctagagggtctccctgtcacaagcattgaccaattttttgccagatcagaagaaggtcaggggtgggggcactgtgggggtctcaggggagtggctatttaccaagaaggatggaagaattccaacttgtaataattgatagggttttaccgatgtgttctagagcctgctgctggttgtgtggccacatggctggagttagagtcccagctctggcagaggaggcctgggtgaggtttgcaggggctgagttcctctagctcaggccgtataagtagcacaaattcaactttttatatttatattaatacttacgatttttatattaacgctgtcccctatataaccaagtgttttcagtcacagttctttgagatgagtgtttatttgaagctggagcctttatttgctcacagtcgctgtttcctaacaaataatactccagcacccacctaacaggtcctctggaattagtagacttgaaagcatcagtaacacaccacgtggtttcagaagaccctacctacagttgggaatctgacaggtgcatgatgtggactccccacagggctcacaggtcaaggaacacgtgctccccaccagcagaaggcaggcactggactggtgcatgtggagtggggccctgttgccttgtaggtgtgggacatttcagcatgggtcaagtgttccccacaccagtccctctgccagggcctcatgtggaccaccctaatttattgccttttcagctcaatgaggtagatactgttggcatctcctgtttacagactggaatctgaggctccaagaggcttagggacatgcccagtggcctgcccatgctggagtccctctgtcttctccagagcctacccttgccccctgcactgctgcccggtgtccttgtccatgtcagagtctgctgtcccctcctcactgtgtgcttcccgcctctaggctggcacaaggtagctacttgggaaatactggcgaaagttggaacaaatgaatgaaggaaggaatgaagtctacatggtcgaggaagttgggtggcacaggctcaggccatattttggaatagtcgagccttcttgaaatctaatgtctgcccccacttgactgtttcacgcaattccttaaattgtgactatagcgaaaaaaagagatgatcaatcctgaggtgatgatttcccttaatagccccttgagatatgaccccgaaggctcagctggagctgcagggagatgccaactgcattgttcactgccagcctgtaggctcagaagggggtgttggcagagaaggaacctcccagcccaggagtcagactttccactgggagcagcctgggaagcttgcagtcagctgaaagttctctcccaaaacagcatatgtggcaggtgcgttccctaactcctgcaaggtgacttcagagcagcttatctggcttctgtcctggggaggcagctggaggcagaaccccagctgctagccagggaagagctgctagcccttcctgttcctgctgcctgcctgtcctatgcctctgcctgagcacagctttgtctggagatcctaagccctggcagggctttgtgcatgtggttctaaaggtgtctgaagcccacttccccagagaaagagacagacaccatgagaagctcctctgcccaaggcaccattcctgctttgacagatactcacactccagaaggcttgtcggaggcatgccagccacatttggtcctttcctttgctccggtccctttgtcttaccttgccatcctccctatttattcatggaaacaccgctggaagcccccaggagaagactcatgctaggctgggtggatgcagggcagctgcagtaggtggaaatgaagcaaacctagaagattcctaccccaggctcctggatgtcctgctgaggggagggccagagtgtgtttgaaataccagcctcattcgtgctcatacacaacatgcttcagtggccctgctcaccatacaccatacaccatccacagagctcaggaaagacatcacattcattcgtgagcccaaaggcattggggtacaagcctgatggggtacaagctaaatattgtcacatgccactaaccacaggaagtgtctcctgcctcacccaaagactctgcttgtccaggcccctacaggtagagttgccaggtaaaatgcagagcaccctgtggaatgtgaacttcagataaacattgaataaatttttggaataagcgtgtcccaaatactgcatacgactcactgaataaactacctgtgtatctgatattcaaattaactgggcatcctatatttttattttctttttattttctttttttttttttttttgagacagagtcttgcactgtcactggggctggagtgcagtggcaccatctcggctcattgcaacctctgcctcccaggttcaagtgattctccttgcctcagcctcccaagtagctgggattataggcacctgccaccatgccccgctaattttttttatatttttagtagagatagggtttcactatgttggtcaggctggtctcaaactcctgacctcgtgatccacctgcctcgggcctcccaaagtgctggggttacaggcgtgagccactgcacccagcctatatttttattttctaaacccagcaaccctaagattattgagccatcaccggtgtagataattgaggaataactaatagctattgtccatgactcattgtttggttccataggcttctaactaaaaaaaaaaaaaaatcttacctggactattacataatgacagctgttcagggaagtcccccagcatctactcctacagatctcaggcacatctttggtatattcaccagaatgatctttctatgagaaaaatatgacaagttcaggcctaaattcaatattcctttacagtttcctgtgtctctcatgaaaaacaaaaacaaaagcttactgtgttcacaaaggctttgtccctggagccctccacaaccctcctgcctcacaatggttcaccgtaggtttcatggcagatgaaagagagcgaaccagagaaggtcagtgtgcattcacatcccaggcccaagatgggaggagggaaggggtgcccggctcagtcctttctcctccctccttaactgagctcctggggtggagctaagaaatgagatggaaaaaatataaatgtcataaaaggacagatcaaatttccatccttcataaatataactatttatctataaaatataaaagaatcactggctgggcaaggtggcttatgcctgtaatccctgcactttgggaggccgaggcaggaggatcacttaaggtcagttcaagaccagccaggccaacagggtgaaaccctgtctctgctaaaaatacaaaaattagccaggcgtggtggtgcacacctgtaatcccagctacttgggaggctgaggcaagaaaatcacttgaacccgggaggcagaggttccagtgagccaagattgtgccactgcactctagcccaggcaacaaagagagactctgtctcaaaaatagaaataaaaaaataaaagaatcaattatcttagaagtattaatattaggaaaaaaatgagaatccaaaaagatggttgggtataagatgaataaaaaataaatcaagagtttttctcataaaccagcaatagttaatttaaaatatgataaaatagtaacaatagcaaataaatgcataaagaaagtaaaaataatcctcccaagaaatgagaagacataaattttcagagtcttatttacttatgaagttcggaatacacacggtcctggatttatggaggcttgacttaaaatttatagacttcacattggtccaaaagcgatgtgaattcaggagaagccacacttcaggtacacatacaaccattcattcacctccagtacagtagccaataaattccatgagatagtcagcaccctattataaaatagaccttgtgttagatagttttgcctaactgcaggctaacatagggttctgggcatggttaaagtagtctaggctcagctatgatgtttggtaggttagatgtattaaatgcattttccatttaagatatcattttgcaatgtgtttatcaggacctaaccacatcataagtcaaggaacatttgtacatgcttctccttgtttttctcttaatttacgggaaggctcaataatgtgtgtgctgggtcccaagcacatgtggaatggtgaccagattaaaaattatcattcagaaaagaatcagaaattattcccctcattctcatctgattttgtgggtcttgatccagagcttgcctctgcccaagaaaagcagtaaatccacgagagagagtgttcgcaggtgtgagggtgggagtagtgggagcctttctggaggtgggacacatacgtggctgcctcctcaagcaattggggacattgtctcaatcctgcacagccctggggtatggggcagtggtcccatttcaagccgacatgagactaggatggctcactgaggcctggaactgagccctgagtgccaacatcactgctgggctgcagaaatcattcaggtggctgcgcagaggacggaaggcattatatccccacccacaaatgcaccacatggattcaagatgcccatgtgttcttccaaatggtgtctgtagctccccaacctccagcagcatcatagcgaggagagcaggttgcccctcccatcaaacaaagaaagcacatcctgagattgaattttccaatcttgaggaaagtgggggctcagagccagagttcatttcatttacaaaaacagaaatgtgatgtttcttggaaccaaagctatggaaactcatgtgaacacactaacgatttattatgcttaaatcatctttattcagctcaggggtggggtggctgggagcatgaacttcaggtccaggaagatgggtttggatccagtctttgccatttgctctctgaaataacactcaaaacatttcactcctctaagcttcagtgtccttataaaaaattgggtaaacaatactggtcccgtgacattgtgtaaagattgaatagtacataataaactgtattaaaagattttgtcaaggtgtgtggcacatggtatgtgctcggtcaatagcctttgtgtgtagtaacggctctggtagtaattttgctagctggagagatggtaataattgtgacagcaacaagtatttttatccccatttcacagatgaagatataggctcagggaaaataaataaatatccccaagagtcaccgggtactgtgcccaccccaagacacatcctaagacctggcacatgttaattttaatgattatctgggtgaatgtattaataaaaggggaaagtggagccggtggcatggggggtggtgtgaatgcccaccgaggtctgaagtggggtgcagatttgttcatcagcagaaagttactcgggtcatgtctgcagtggggggctcttccctagaggccttggccggctgcctccaggtcagggggctgagttggcatccaaagactcaaaggagtgaatcgtacatgtcagtcacagggttggcttgggcaccaccgtgctggggcaccactgggccctctgaccacctggagagcctgaccaggcctgccacagagacctcagagtgccagagaatctccactgtgtccttagctccacacagtcagggcttccctgaaatctgcctctctctgtcattatgcttggccggtactgctcatcctgatggcactgggcaggcagtgggctgcagaggcagagctgaggggaccaggaggcaggcactctgtgtgactttggaggatccttctaccccaaggcctcactgctgccatctgtaagtgaaggaactggaccagatggggaataaggaggcctccatctcatgccaaaggccaaggctaggagtggctgcctggggtgcagtgctgggatggtttgcaaggggagtgtcaaggctggtcagtgattatggggaagagtcagggcccatcaggggaatgaagtggctaagggtgcctccagctctaatagccacaagtgaattctgttgaaagggagttctagcatctcacagaccaagtggatcctggggatggaaactgaaggccagacaggatcctccctgtcccatggcctaaatgcctctcagaactcacagatggtcagtcgggagtacaggcagttcctgtcattccactgcccatctgtgtacatctccacacactgctcttttccccgacctgcaggctcccctcggtaccagttggtgtagtttacaggggtcccatctgagtagcggaagtctccagggctgggaccctcagtcaggcctacataggcatatgtgttgtacttcttcacgaagcttgcaatggcctcattttcctctggattccttgggacagcaatgcggccgcctgctctggcacatgcctcctgaatggcatcaaaagtgatggactgcccattgctggagaagaccttctctcctactgtcattatggagccctgcagactgagggctgagagcagaggagtccaggtcaggccactgaccactttgtctctaagccacctccctcacctagggtctctgctaccagattctccccagtctctccatctctgcctctctctgtgtcttctcttcctcttccaattgcagttttctaaattcacttttagactctcctccatttattcattcatctaagtaacaattacttattgccagaaatggtgcaatttcctaggattcagtggaaagcaagacaggcagagaacttgctttcttatgaaatggggagtgaattgtgtctgcttgtctcctcttggccattcaaagacatcagaaaagcaagcatcattcctttccccaacacctgcatgtgcacgcttgtttgtcatctctattctagaaggtggtgctgagaatgaggggaatttgtgggaaactcctaccccgtgaggcccagggggtccccttacctccccttgtctgcaggatttgatgtctgaagtcgtggagtgtggcttggagctcctcatctagatgagctggaagccctgtggagagtgccccacacagaaggaggggcaggccagtgaagactcccacttgctgccacgcaggcgttttgccatctgcaatcctggaactctgccctttcattgctgttaggcaccacccagaccctaggctcagagggtccacgagattccagtgtgtctccacaccccgtggtcccctattctttagtgaagccttgcccctgctgagacccccaccccttgtcctctttcctgctctgtccctcgaggggttctgtctgcccgcctctgtggggcaagtccctctcccgcaccctccaccaagggcaagcatgatgctctctgcactgccctgatggacttgcttaccgctctgagcttcaaagttcccctctgtctgtggggctcctgatcacaccatctgcctggatgcctcgtccgcattcacccttcagactgcccccagggcctccatcccaggacatgcctcccctgcctcccagtgctgtccctcgtcccacacctgactcagtgtgtccccatcagcggtcatgaggcacggaggacttcccacacctgcccttctctgaattgtgaccacactccccagacacctcggctttctccctcaaattcatattctcttacttaggttgagccaaatgcccttggggaacctgcagggtttgtctgacccccatcacccctgtgtaactgacttcaggtcgctgtgcccatgtttccactgcccacctgccccgccctgctcacctggagggcctctctcgccagcctcccccttctctccacgctctccagggacaccaggggctccaggcagcccattattcccaggaggacatggtgtttctccaggcggacccatggggcctgcagagaaaagagacatggatgtgtaggatctgtcacccacaactggttggagctagtgagactcgatgcccattatcaccggggctggctcagctatcactccgtgggcactatgaggacagactctccaggatgcgccatcataagggccccaggaacccaccagccctgcagactgaagtcccacccagcttactatagcccccagctcactatggcccacagcctaggggcctggacagatgggcctcctgaaaaggggtctgtgtccctcagctgagggtggggtctgcagcacagtacctggagggccagggtctcctttgacaccatctctcccgtccctgcctggcaggccgtgggatccaggagtgccggggataccagggcttccaacacaaacgtccttcacttcgcacgcagcaccagaggctgccatcaagatgagggtgagggccagagggcacagccacatggctctgggtccagtcgctgctcctgccggagggatggccgtgagcccatctgccacctctgccaacatctcccccactgtgctctgtcaggactcaggaagctgggcagagcccgagaggcagggcgggcgagaccagagtgctgggaagacccgaagcacccgggaaaattccaagcatcacctggcacctggcatggcctcatgcttcaggcctccggctggaggttgtggggtctcaagactgctgaggaggaggaagagtaaggagctctggggagcccagggacctgggctccagtgcagtctcctttctttcagtgcctcactatgttaccctgggaaactggcttcacctctctgatttcagctgaatcttccatgctctgcagaaaacctgccctgtccctcccaggctgttagaaggaaggatgaggtcactcactcactgactcactccatctgtccctcatatgcccagttaccttcttttcaggctccaagaaatcagcgacctgagaatgaaaagagatgaatagggcccacagcctggacccttcaaggtgatcatcggggggtgatgaccctctcacagtcagtgatgaggtcttccttcctcttggggtctgttctcccactccccctgcttaggccctgctgagtccctggtagggatggatctggccaaggaagatatcaaagcatgagggtctttgtaggtcatccatgttgaccatgctgtgaaacacctcccagtggaaaatggggagttgccctccttcccaacctgggccttggtcaggcctgtggctgctgggctggtcctctctgcctgcgatcctcaagctggagaacacctaggggatgtggctaaactcacccacacacagagcctccagctgcttgggtctctgcctccaagttagagcataaaggtggacaacagaatttatagcatgtgggctgccaggcttcttccccacccctgagagctctaccacaaaacctgttctccaagcaggaaataggcatagtgtttacacagcacatttccctgcagaacactcaggctgcaggaatacttaggacccttgaggggagcacagaacctggtaaagaaaaataccaggtctgtaagaagagaaatgcctcactggctaaggtcacccactctgcactcagggagctccactgggttcctggtttagtttcagacaatgaagaagtcactgcttcagctgaggttggtcaggttgatccaggccaacctgtctgccctgtaaccttgctcagctctgagccccaggacccccagccagtgtctctggagcctgcagccgagttggtgggcacatggacagagtggcaggcaaatatgctgcacgttccacttccctctgccctagcaggttcagctggaggagtcagggcagcacctggaaggtcatgggagagctgcagtttctgtctttggtagaacatcactttgggtgatgtctggcaacctgcaatggtgattatgctaagtgtcccagtgatatatgaagccctagttgttagggtcctggtttgagcatctggattaggagggaatctccaactgtggaggtggtaatgatgggaacccagacaggaaaatctcccctggcttatttggaattggtttgaaaaatcccaaaccattgaggagtttggagctcttccagggagcggaagctcagacaacggaccccactcccaggagcaggaagctgggcagtgccaatttgtagcatggagtctttcagctgccccagtgctgtctgccacaccatgtggtgggtgctgggccaggtgtggaatgggggagtcaggccagtgcaggttgggggcaggtggggcgaagctccagcaacttggctgtggggaggcagggctgttttgcaggtgatgagcaggaacagaggccaacttggatgtgcagggccttgtggttggcagggcagggcatggctttaggggaaaggcacacctgagttttgacccagagctgtcacttattaaccaggtggccttggtcagtttcatttttcattttattattctgaaacaacatcaaaattacagaaaaattgccagtatcgtacgacttttttttcccctgaacctatgagagtaggttgtcaacatgaaaccccaacaccccaatactttaatgtgtttttcacgcaaaggcatttttgcattataaccgtaatcaagaaataaacacggatacaataactccaaatagccttcaggccctatgcaaaatgtacacaatgccccaatagtgtcctttatagcaaaggatccgtttctgagccatgtgccttattcggttgtcacgcttctccagggtcctgaaacccacaaagtccctctgtcttcccttcaccttcatgacctgaacacagtgtgaagatcacaggggagttactgtgtaaaatacccctcactttgtttgtttgtttgtttgtattgccttacagttagattcaggttctgtaacttcggcagaaataccatcgacacccggctgcgctcttctcccattctacccggcagcatgtgactttagtttgccccaagactgatgatgttcgtgttgatcatttaattaaggtggtgggtgtcacaatttgccactgcaaatttattctttttctgattttaatcagtgactatgttgtggggacgcactttgggactattgtaaagatcccatccctcatcacgctctttgttgccctttgattgatttgtagcaatgtggactcgtgagtgaggcttgccaccgaccgccagggggaaccatgcactcgcctgcgtgctgcaagggacactatccgagtttgatgttgagacaggtacagtttaccagcacatggcaccagcaaatctaaagaatgtagttaagaaacacaagcttgtcattcttagcactaagaattgctgcagtccctgctgagttccgagtgtccaagccaggccactctgccgcgtccacagcctcctccccctgctcaggccccattgccctggccggtccgctctccttcagtgcccttctcactctcctaggggcttcaacccccatgctgggccacctccctctgcggggacatcctcttcacactgccaggccctgggtgcccacgcgaagccacctcagagtccacagtctcactgcactccgagtcccactccctgtggcaggaccccctcctcacccagtgtgactgaaaccaggaagacgacgctttttaagactgaaggggcacagagtgggagccatgcaccgccctaagaacagcccacgggggtctctgcagattcgagacctctctctcagtgctcaagggactctttccttcccctttctccagctgcactgggtgctagcagtgggaagaggctgtctgtggctgctagagctttcccgtcgttttggatcattgcagcactctatgaggcgtacagagagtaagtaaatccccattccatacttcagtcaactgaggctgacaggggttacatggattgccaaaattacccagaaatcctctttccagctcagtcctctgctagaaccttcccagagtcagagggatgtgcttaatctacctgtacctggagacaaagagatgcataaatagatttactaattatggatatatttcaagatcacttctactgtcagaatctaaggggcagctcagccacattaagggaatggaagttgacgcttcttttccttgatgcagccagcatactaagcaattatgtgtgtatgtattataaatatatgtacacacatatattgtgtgctgtatatttacacacatatctatattacattggcacatctaataaatgtcactgcattcttaaaaagcataacacaataaatctttctatgacctagaaatgacaaattttaattttcatcaacacagccctctcacctcactaccctgagcattttgagtcttccaaaccccagagaaacacgtcatgttttattaaggctttgaggtgagggagacagtttttcccattctgcgccttggaggaattgaaactggcagatggcagcaactatctccaatgaaataggctcaggaaaacacacgtgcacatacacacacacacacacacacgcacacacacacactgactttgcatcaataagaccatactgcagatactcttctacaataagtgttttctcttacataccccagccatattttcagattgacacacagggatataattgttaactatagtcttttcttggggtttgcttgtttttaatttgggtgacttattctttactctttttaattttaaaaaatttcttatttttaatggacacataattttatatatacatgggatatagtgagctattttgatacatgtatgcaataatcaatgatcaaatcagggtaagttgtatacccatcaccccaaaagtgtatcaatatttagtgataagaacattcacagtcttctcttttacctctttgaatgtatataatgagttattgttcactatggtcaccctccagtgctctagaaggctagaactcattgctcttgtctagctatgatcttttgtccattgaccaagctctccccatccttcattctcctggttttcccagcctctagtatgctctgttctactgtttacgtctgtgagattaactttatttttagcttccacatatgtgtgagaagatgctgtgtttaactttctcttcctggctttatttcatttaacataatggctcatccatgttgccatgaatgacaggatttcattctttcttagggccggacagtatttcatggtgtatagttatcgcattttctttatccatccatccattggtagacacttaatttgattccacatttggctattgtgaatagtactacaataaacatgggagtgcagatacttcttcaacatactgagttcctttcctttgaatatattcctatgaatactgagtagtggaattgttagatcatatggtcgttctattttttgttttttggaggaatctcccctctgttttccataataactgtactgctttacatttccaccaacagtgtataagagttcacttttctctgcatccttgccagtatttattagttattgtcttattaataagagccagtctacctggggtgagatatctcattgtggtttgattgacattttccttaggagtagtagtattgagaattcttatttttatattatatctattattttattttagacagggtcttgctctgtcacccaggacagagcgcagtgacacaatctcagctcactgcagccttcacctcctggactcaagcaatcctcccaactcagcctcctgagtagctgacactataggcatagaccaccatgcccggataattttttatttttgtaagcatgaaatctcactatgtttcccaggctggtctcaaactcctgggctcaagccaacttcccacttcagcctcccaaattactgggattacaggcaagagccaccgggcctggccaagcatttttaatatacttgttggcaatttatatgtcttctttcaagacgtgtctgttcagatcatttgcccattttaaaattgtattatttggatttttttgctgtagacttgtttgagttccttgtgtatacaggatattaattccttattggattaatagttgcaaatattttctccaattctgcaggttttctcttcacactgctgattgttttctctgcagatgctttttagtttgatataatcccatttgtttattttcgcttttgttgcctgtgcttttgaggtctttcataaaatcttcacccaaaccggtgtcctgaggcacttctcctgtgtttatttctagtagtttcatagttttgggacttacatttaagtctttagtccattttgtgttgattttttgtatgtgtgagagataggagtccagttgcattcttctgcatatgaatatccagtttccccagcatcatttattgaacagactgttctttcccccaacatatgttcttgatgcctttgtcaaaaatcagttgactataaatatgcgaatttatttctgtgttctctattgtgttccattgctctatgtgtttataacagcaccatgctgttttggttatcatagatttgtagtacatgttgaagtcaggtagtgtgatgcctccagcttttcactttttgcttagggttgccttgactatttggtgtctttttatggttccatacaaattttatgattgttcattctcattttgtgaagaatgtcattattattttaataggcatggcattaaatctgtagatcactttgggtagtatggttattttaacaatactgattcttccaatccatgaacatgagatgtcttttcacttttttgtatcctcttcagttttttcttcagtgttttatagctttcatagtagagatctttcactccctggttacatttattcctaggtattttatactttgtagccattgtaaacgggattgacttcttgatttctttctcatgtagttcttcttgatgtatacaaatgctgttgatttttgtatgttgattttgtatcctgcaactttactggattcatttatcagttctaagagtgtttttgtgaagtctttaggattttgtctttttaagatcatgttgtctgcaaatagggacaatttgatttcttcctttcctatttggatacgctttatttttttcccatgattaattactctggctaggacttccttaactatcttgaataagagtagtgggctgggcgcagtggctcacgcctgtaatcccaggactttgggaggccaaggtgggaagatcacctgaggtcaggagttggagaccagcttggccaacatggtgaaaccccgtctctactaaaaatacaaaaaaattagccaggcatggtggtgggtgcctgtaatcccagtacttgggaggctgaggcaggagaatcacttgaacatgggaggcggaggttgcagtgagccaagatcacgccactacaccactgccctccagcctgggtaacagagcaagactctgtctcaaaaaaaaaaaaaaaaaaaaaaaaaaagagtagtgaaagtgggcaaccttgtcttgctcaaattattagcggaaaactttcaaattttctccattcagtatgatggtagctgtcgatttttttgtatatggcctttattgtgttgaggtacttggtttatacacctaatttgttgagggtttttatgatgaagggatgttaaattttgtcaaatattttttctgcatctattgagatgatcatatgttttcttcttcattccgttgatgtaatgtatcacacttattgatttatatatgttgaaccatccttgcatccctgagatgaatcccacttgatgatgattgtattttggatgtgctgctggattctgtttgctagtattttgttgaggatttttgtatctctgttcatcagagatattagcttgtactgttcttgttgttgttgtgtttatgtctggttttgctgtcaggatatcaggataatgctggccccataaaatgagattggaagaatttcctcctcttcaattttttggaatagcttgaaaagaattggtgttttttgttctttaaaactttggcagaattcagcagtgaaggcatctagtcatggacttttctttgatggtagacgttttattattgattcaatattgttactagtaattggtatgttcgggttttctatttcttcctggttcagtcttggtaggttgtatgtgtccaggaattcatccattttccctagattttctcatttgttgacataagttgtttataataatgtttaatgatcgtttgtatttctgtggtatcaattgtaagtctccttttttgtttctcatttttacttatctcagtcttctctcttatttttttagttagtctacctaatggtttgtcaattttgtttatctgttcaaaataccaacgtttcagctcagtgtagtggctcatgcctgtaatcccagcactgaggccaaggcaggaggatcacttgaggccaggagtttgagaccatcctgggcaataaaaaaaatactacatcttttaaaaaagaagaaaaaaaatcttagctgggtgtggtggcacatgcctgtattcccagctgctcagaagaatgaaggtctctggcgctcatgagctggaggctgcagtgagccatgacagaggcactgcacttcatcctgggtgacagagtaagatgctcaccccagaaaaatacaaaaacaaacaaacaaacaaaaacctccccaacttttcattttattgatctctagtctgtttgttgtttatttctgctctgatttttcaagtttctttctactaattttgagtttggctctttttcttgcttttctagttctttaaggtgcattattgttttatttttttgaaatcatctacttttttgatgtaggcatgcaacgctataaatttccctcttaggttttgatatgttgtgtttgtatttttgtttctttcaaggaaatttttaatttccgtcttaatttgtttattcacccattggtctttcagaagcatattgtttaatttctatgtatttgttcagtttccaaagttcctcttgttattgctttcttgttttattccattgtgttcataaaaggtaattgaaatgattgtgatgttttaaaattcattgagacttgctttgtggcctaatatatggtctatcctggagaatgttctatgtgctgatgaaaagaatgagtattctgtaactgtcagatgaaatgttcttcaagtgtctgttaggtccatttgttctggagcacagattaaatccagtgtttctttgttgattttgtgtctaagcgatctatcaatactgagagtgaactgttgaagtccccaacaattattgtattggagtctgcctctccctttagctctaataatatttgatttctatagtttggttttctggtgttgggtgaatgtatctttacaattgtcatatccttttactaaatcaatccctttgtcattatatgtgatcttccttgacttttctcacagcttttgatttaaagtacattttatctgaaataagtatagtgacttctgctcactttttatttctatttgcatgaattttttttcattcatttacattcagtctatgcatgtttttacaagtcatgtaagtttcttataagaagcatatagtttggtccctttttttatccatttagccagtctatattttttaattgagtaatttagtctgtttacattcaaggttattgttgataagtgaggattactcttgtgatttaaacagttgttttctgattattttgtctcttctttgttacttcctctcttattgtttatcttcgtagtttgttggttttctgtagtgataaattttgattgctttctctttctcatttgtatgttttctctaccaatgagttttatactttcacatgttttcacaaaggtagttatttttccttcacttccaggtataggagtcccttaaggattttttataaggctagtctagtagtgatgaattttctctagttttgtttgcctgggaaagtctttatttctctttcatctctgaataatagctttgctgggtgtagtattcttttctgacagttttttttccaacactttgaaaattatcttattctctcctgacttctagggtttattctaagaaacctgctgttagtctaatagggattcccttattttgacttagcacatttttcttactgctttgactatctttgacttttgacagtttatttacaatgagcttcagtgaaaacgtttttggattgaatctatccaaactcctggaaaacattatgctttaggctttgaggagaggcagccagctttcctcattctgccaccttggaggaattgaaattctcaggtggcagcaaatgtctccaaagaaatagactcagaaattctctctctctcttactttgcaccaaaaagatcatactgcagatactcttctacaactagtgttacatacctcagacatccagacatctattcaaattctgcaattagtgatttcccttacatccctcaggcatcttttcagatgaacacatatagacctaattataactatactcttttcttgggggttgcttgtttttaattttggtaatgtattcttcactatctttttaactttttggaaaaacttgtgcaccataataaacaaaaaagataacagataagtttacatttcagtgagttgttacaaattaaaacctataaaactaccaaccagtcaaaaagtaaactttgccagcaccacagagaccttcttgtatggtcagtttctatgccctctctcttacctataggaactcattattctaacctctgttgccattgattaggttccctgttcttgaaatttatataaaggacatacttatacactagggaattttggggtctggctactttggatcgccattgtatgtgtgagattgatctatgttgttgcacatggcaatagtgtgttcattgctgaccaatattctactagatgaatatatgacaactggttctttactatggtgttgacagacagtgattttttcagtttcaatttagtatgtataatgctgatgtgaacattcttgtacataaagctgtcaggttatgaggttttcatatgttaaaatattaaagtattaaagtatattctggatgggattccaagatggctgaataggaacagctctggtctgcagctcccagcgtgattgagacagaagatgggtgatttctgcatttccaactgaggtaagtggttcatctcactgggactggtcagaaagtgggtgcagcccatggacggtgagccaaagcagggtggggcattgcctcacctaggaagtgcaggaggttgggggatttccctttcctagccaagggaagctgtgacagattgtactgggaaaatcgggaaactgccacctaaacactgtgcttttccaatggtcttatcaaatggcacaccaggagattatatcccgcacatggctcagtgggtcccatgcccatggagccttgccactgctagtcccagacagaactgcgaggcagcaagcctggctgggggaggggcgtctacaattgctgagacttgagtaggtaaacaaagcagccaggaagctcgaactgggtggagcccactgcagctcaacagcctacctctgtagactccgcctctgggggcatgacacagctgaacaaaaggcagcagaaacctctgcagacttaaacatccctgtctgacagctctgaaggagcagtggttctctcaatgtggtgtttgagctctgaaaatggacagacagcctcctcaagtgggtccctgacccccacatagcctaacttggagacacctcccagtaggggccaactgacacctcatacagccaggtgccctctgagacgaagcttccagaggaaggatcaggcagcaatatttgctgttctgcaatatttgctgttcacctgtcctggtgaaacccaggcaaacagggtctggagtggacctccagcaaactccaacagacctgcagctgagggacctgactgttagaaagaaaactaacaaacagaaaggaatagcatcaacatcaatagaaaggacatccacaccaaaatcccatatgtaggtcaccatcatcaaaggccaaaggtagataaaaccacaaagatggggagaaaccagagcagaaaagctgaaaattctaaaaaccagagtgccccttcttctccaaaggattgcagctcctcaccagcaacagaacaaagcaggacagagaatgactttgatgagctgacagaagtaggcttcagaaagtcggtaataacaaacttctccaagctaaaggaggatgttcaaacccatcacaaggaagctaaaaacttgaaaaaagattagacgaatggctaagtagaataaacagtgtagagaagaccttaaataacctgatggagctgaaaaccacagcatgagaactacgtgatgcgtgcacaagcttcagtagcggattcaatcaagtggaagaaagggtatcagtgattgaagatcaaattaatgaaatgagaagtttagagaaaaaagagtaaaaagaaatgaacaaagcccccaagaaatatgggactatgtgaaaagaccaaatctacatcagattggtgtacatgaaagtgatggggagaatggaaccaagctggaaaacactcttcaggatattatccaggagaacttccccaatgtagcaaggcaggccaacattcaaattcaggaaatacagagaacaccacaaagatactccttgagaaaagcaaccccaagacacatgtttgtcagattcaccaaggttgaaatgaaggaaaaaatgttaagggcagccagagagaaaggtcaggttacccacaaagggaagcccatcagactaacagaggatctctcggcagaaacccttcaagccagaagggagtgggggccaatattcaacattcttaaagaaaagaattttcaacccagaatttcatatccagccaaactaagcttcataagtgtaggaaaaataaactcctttacagacaagcaaatgctgagagattttgtcaccacgaggcctgccctaaaagagctcccgaaggaagcactaaaaatggaaaggaacaaccagtaccagccactgcaaaacatgccaaactgtaaagaccatcgatgctaggaagaaactgcatcaactaatgggcaaaataaccagctaacatcatggctaaatgctccagttaaaagacacagactggcaatttggataaagagtcaagacccatcagtgtgctgtattcaggagacccatctcacatgcagagatgcacatagactcaaaataaagggatggaggaagatctaccaagcaaatggaaagcaaacaaaaaagaaaaagaaaaaaaaaaagcagggattgaaatcctagtctctgataaaacagactttaaaccagcaaagatcaaaagagacaaagagggccattacataatggtaaagggatcaattcaacaagaagagctaactatcctaaatatacatgtacccaacacaggagcacctagattcataaagcaagttctgagatacttacaaagagacttagactcccacacaataataataataggagactttaacaccccactgtcaatattagacagatcaatgagacagaaggttaacaaggatatccaggacttgaactcagttctacaccaagcagacctaatagacatccacagaactctccaccccaaatcaacagaatatacattcttctcagcaccacatcacacttattccaaaattgaccacatagttggaagtaaagcactcctcagcaaatgtaaaagaacagaaatcacaacaaactgtctctcagaccacagtgcaatcaaattagaactcaggattaataaactctctcaaaactgcacaactacatggaaactgaacaacctgctcctgaattactactgggtaaataacaaaatgaaggcagaaataaagatgttctttgaaaccaatgagaacaaagacacaacgtagcagaatctctgggacacatttaaagcagtgtgtagagggaaatttatagcactaaatgcccataagagaaagcaggaaagatataaaattgacaccctaacatcacaattaaaagaactagagaagcaagagcaaacaaattcaaaagctagcagaaggcaagaaataagatcagagcagaactgaaggagatagagacaaaaaaacccttaaaaaaatcaatgaatccaggagctggttttttgaaaagaaaagcaaaattgatagacttctaacaagactaataaagaggaaaagagagaagaatcaaatagacacaataaaaaatgatgaaggggatatcaccaccgatcccacagaaatgcaaactaccatcagagaatactataaacacctgtacacaaatcaactagaaaatatagaagaaatggataaattcccagacacatacatcctcctagactaaagcaggaagaagttgaatctctgaatagaccaataacaggttctgaaattaaggcaataattaatagcctaccaaccaaaaaaagtccaggaccagacggattcacagccgaattctgccagaggtacaaagaggagttggtaccgttccttctgaaactatttcaatcaatagaaaaagagggaatcctccctaactcattttatgaggccagcatcatcctgataccaaagcctggcagagacacaaacaaaaaaagagaattttagaccaatatccctgaagaacgttgatgtgaaaatcctcaataaaatactggcaaaccgaatctagcagcacatcaaaaagcttatcccccatgatcaagtcggcttcatccctgggatgcaaggctggttcaacatatgcaaatcaataaacgtaatccatcacataaacagaaccaaagacaaaaaccacatgattatctcaatagatgcagaaaaggcctctgacaaaattcaacagcgcttcatgctaaaaactctcaataaactaggtattgatggaatatatctcaaaataataagagctatttatgacaaacgcacagccaatatcatacagaatgggcaaaacctggaagcattccctttgaaaactggcacaagacagggatgcctcctctcaccactcctttcaacatagtgttggaatttctggctagggcaatcaggcaagagaaagaaataaagagtatttaattaggaaaaaaggaagtcaaattgtccctgtttgcagatgacatgattgtatatttagaaaaccccatcatctcagcccaaaatcttccttaagctgataagcaacttcagcaaagtctcaggatccaaaatcaatgtgcaaaaatcacattcttaaacaccaatcccagacaaacagagagccaaatcatgagtgaactcccattcacaattgctacaaagagaataaaatacctaggaatccaactaacaagggatgtgaaggacctcttcaaggagaactacaaaccactgctcaatgaaataaaagaggacacaaacaaatggaagaatatttcatgctcatggataggaagaatcaatattgtgaaaatggccatactgcccaaggtaatttatggattcaaggccatccccatcaagctaccaatgactttcttcacagaattagaaaaaactactttaagttcatatggaaccaaaaaagggcccacgttcccaagaaaatcctaagccaaaagaacaaagctggaggcatcacgttacctgatttcaaactatactacaaggctacagtaatcaaaacagcatggtaatggtaccaaaacagagatattgatgaatggagcagaacagaggcctcagaaataacaccacacatctacaaccatctgatctttgacaaacctgacaaaaacaagaaatggggaaaggattccctattaataaatggtgctgggaaaactggctagccatatgtagaaagctgaaactggatcccttccttacaccttatacaaaaaattaattcaagatggattaaagacttaaatgttagacctgaaaccataaaaaccctagaagaaatcctaggcaatagcattcaggacataggcatgggcaaggacttcatgtctaaaacagcaaaagcaatggcaacaaaagccaaaactgacaaatgggatctaattaaactaaagaggttctgcacagcaaaagaaactaccatcagagtgaacaggcaacctacagaatgggagaaaatttttgcaatctacccatctgacaaagggctaatatccagaatctacaaagaacttaaacaaatttacaagaaaaaaatcaaacaacctcatcaacaagtgggcaaacgatatgaacagacacttttcaaaagaagacatttatgcagccaacagacacatgaaaaaatgctcatcctcaatggtcatcagagaaatgcaaatcaaaaccacaatgagataccatctcacaccagttagaatggcgatcattaaaaagtcaggaaacaacaggtgctggagaggatgtggagaaataggaatgcttttacaccattggttggagtgtaaactagttcattcattgtggaagacagtgtggcgattcctcaaggatctagaactagaaataccatttgacccagcaatccattactgggcatatacccaaaggattataaatcatgctactataaagatacatgcacacgtatgtttattgcggcactattcacaatagcaaagacttggaaccaacccaaatgtcaatcaatgatagactggattaagaaaatgtggcacatatacaccatggaatactatgcagccataaaaaaggatgagctcatgtcctttgtaacaacatggatgaagctggaaaccatcattctgagcaagctatcacaaggacagaaaaccaaacaccgcatgttctcactcataggtgggaatcgaacaatgagaacacatggacacagggcggggaacatcactcactggggcctgtcatggggtggggggaagggggagggataacattaggagaaatacctaatgtaaatgacgagttaatgggtgcagcaaaccaacatggcacatgtatacctatgtaacaaacctgcatgttgtgcacatgtaccctagaacttatagtttaaaaaaaagaaaaaataaaataaaataaaatatattctgtcaaactgtttttcaaattccaacaatttctccttctatcagcagtatttgacatttccagttgctgtatattctcaccaacatttgtccatattttaaattttagccagtcgttaatctacacatccaaaaaactcaacaaatttcaagtaggataaactcaaagaaatccacacctagatatatcataatcaaacttttgttcaaatattttacttttgttgaaagcaaaagacaataagtaaatcttaagaattctatatgagggaaagagcatcagagtggcatacttgtttatccagtagcacacagcctccaggggccagacaggatgaaagcagcaataaagggttgaggtcagaaggctcagtgtttcccagtgatatagccctcttgcattaatattggtctcaggcctgtaaggctgtttcaaaattggaaaataaattaatgcaacccatcacatcaacatgtgaaataaggaaaatcacacgatcatatcagtagatacagaagaagcatttgacaaaacccaaaactctcagtaaactatgaatagggtttactacttaataaaaaatatctattaaaagaccttcagctgatagttaatagtgagaaacccaaaattttaccactaagattatgaaaaaggcaagtttgtccctacttacaagtagttttcaacatgtttctgaaagtcttagctaatgcaataagacaaaaaatggaagtcagaggtatatatattgggatggaagagaaaacaatgtctttgttcacacataacataatgagttgtgtaaaaaaatcttaaacaaccaagaaaaaactggaattactaaacagttatggcaaggttacaggatacaaatttaatacaaaaaatcacttttctatatgccagcaatgaataagtaaaatttgaaattaaaaacacaataccatttacattaccacccccaaaataaaatactagggcatacatctaacaaaatatgtataagacctatataaggaaaaccacaaaactctgataaaaggaatcaaagaagagctcaataaatggagagatattccatgttcaaagatagaacgacttaatattgttaagatgccaattatttccagattgatttatagatttaataaaatttcaagttaaatcacagaaaattatttcggaggtattgataagctgattctaaagtgtatgtggagaggcaaaagacacagaatagccaacacaatattgaagaagagtaaagttggaggactgacactacctgacttcaacacttactacacaggtacagttatcgagatagtgtagtattggtgaaaatacagacaaagagatcaatggaacaggataaagagcctagaaatagaactgcgttaatatagtaaactgacctctgagaaagaagcaaaggcaacaaaagaacaatagtcttttcaacaaatgttgctacaacaactgcacatctatatgccaaaaagagtcaatctagacacaaaacttacacctttcacaaaaattaactcaaaatgaatcatagacctaaatgtaaaacacaaaactagcaaattcctagaagataacagagaagatgtaaatgaccttgggtttggcaatgactttttagaagcaactgtgaggcatgatctatgaaagaaagaatagataagctggactttgttaaaattaaaaaatgtctgctttgcaaaatatatttcaagagaatgagaacacaaaaccgagactcagagaaaatatatttgcaaaatatatatctgataaagaagtgttgtatacaaataactcttacaactcaacaataaggacatgactcgattaaaatatggaccaaagtccttaatagacaacttaccaaagaagatatacagatggcatataagcatatgaaaagatgctccatatcatgtgtcatcaggaaaatgcaaactgaaataatgagatacccctatatacttactagaactgccaaaatttggagcactgacaataccaaatgctgctaaggatgtagagcaacagaaactcattcattgatcatgggaatgtaatatggcatagccactttggaacacgatttggtagtttctcataaaactaaacacattcctgacatattatctagcaatcacatcccttggtatttatccaaaggagttgaaagcttatgcccacctaaaaacctgcacataaatttttatagcagctttattcacacttgccaaaacttggcagcaaccaagatgtccttcagtaggtacacggataaataaaccatagtacatccagacaataggacgttattcagtgctaaggataaatgagctatccagccataaaaataaatggaggaaaacttaaatgcatattatcaaatgaaggaagccaatctgaacagactacatactgtattattcaaactatgacagtcaggaaaaggcaaaactgtgaagataatagaaaagatctgtggttgccaggcattataggagagtgtggggggaacaggcagagcacagaagatttttagtgcagtgaaactcttccgtgtgatactataatggtggatactggtcattatacaatggtcaaacacgtagaaatgtacaacaccaagagtgaacactaatgtaaactatggaagctgagtgataatgatgtgtccatgcaagttcatcagttgtactaaatgtactaatctggtgggggatgttcataatgagggaggttaagcacatgtagggcagaggatatatggaaaatctctgcacttcccgcttaattttgtcatgaacctatacctgctctaaaaaataaagtcttttaaaaataaataattaaataaataacaaataaaataatatcacttgtatttctatttaccagtgatgaacacatgaacaacaaaataaaaatatgataccatttacaatcactttaaaaatgaaatacctaggcgtaacaacaaaacggggcatgtatgctgaaaactagaaagtgctgatgcaggaaatcaaagatcaaaataaatggagagacataatatattcatggattgtaaacaaactcagtaaatatgttaatttcctaaagttgttatacaggttcaatacaattgctatcaaaatccaaacatgattgtagatattgacaagattattctaaaaagtatatggaaaggcaagagaactacaataactaaaacaattttcaaaataattaataaagtaaggaattaatccacccaattttaagatttattatagagctacagtaatccagagtgtgttgtattgtacaacatggtgactacaagaatgagaatgtattgtattcctaaaaattgctaagagactagattttaagtatgctcaccagaaaagactgatgagtatgtaatacctgtattagttagctccatttagctattctacaatgtagatatatttcaaaacaacatgttgtacaagataaatacatacaatttttgtcaattaaaataaagaatgttaaaaaccaaataaaaatacgttacagatttcatacaaccacaaaaatgtatcaaaattatacaaaagaatacaaaaagaccaaaaaccatccatcccatgttcagtgtaaaaaacaaactctcctcaacctccatatcccctgtgtgaaggtacactgatgaagattgaggagtatatgtaatatacaatgaagaaatatacaatgaggaaatatgttacatatttcctcatactccgaataggacaccagtttctattgaggagattgaggagtatagattaaacaaaggaaaggtgctgagaactgaaacatatttcctcatactctgaataggacaccggtttccctgaaatcaagttctctacctcactgagagacagttccagtaatcctttattagggagatgggaaaaaaagactgtgtgatattggctgcaggatggacacttatatcactatgactgaagggagaacccagaaacagacccacacaaatatgtccaacatttttaacaaaacagcaaaagcaatgcaatggagggaagataaccttttcaacaaatggtactaaagtgattggacatccataggaataaaaagaaagaaaggaaggaaaggaggatgaaaagaaggaagggagggaaggaaggagggaggaaggaagtaaggaaggaaggaaggaaggaaggaggcccggtgtggtggctagtgcctgtaatcttagcactttgggaggccaaggtgggtggatcccttgaggccagaagtctgagaccagcctggccaagaaaaccccacctgtactacaaaatacaaaaattagccaggtgtggtcgtgcatgcctgtaatcccagctgcttgagaggctgaggcatgagaatgacttcaacccaggaggcagaggttgcaatgagctaagattgtgtcactgcactccagcctgggtgtgggcaacagagtgagactgccaaaaaaaaaaaaaaggaaagaaggaaagaaagaaaaaagaaagaaagcaagaaagaaagcaagaaagaaagaaagaaagaaagaaagaagaaagagaaaaagagaggaagggaaaggaaagaaaaaaggaaaaggaaaggataaaggaaaagaaaggagaaagagagagaaaggaaggaaggaaggagaaagagaaagaaagaaagaaagagaaacagaaagggaaaggaaaggaaagaaacaaggaaaaggaaaagataaaggaaaggcaaggaaaagagaaagaaaaagaaagaaaggaagaaagagaaagaaagaagtgaaggagggatggagggagaaagaaagggagggagacaaggagagagggggatgtcaatctaagattcacatcttatacaaaaaataactcaaaatggatgatagacttgaattaaaatgtaaaactataaaattttagaaaaaatagaagaaatgtttgcaatcttggactaggcaaaaagtccatatacttgacaccaaaagcacaatatattaaaagaagattgataaactggacttcaccaaaatggaaaacctttgctcagtgaaagacgcttttaagaggatgaagagacaagctgcagactgttaagaaaatatttacagatcacatatccaatgaagggctagtatctagtatgtataatgaactctcaaaacttaacagtcaaaaaaacagacaatctaattagaaaatgggcaaaaaatcatttttaattagtggagtataacatagtataaaaattttgaatagaccttatgtgcagccattgcattgttagtattttataatattgtgtggttttggttcttggcgctgtcttaatcccttcaggctgctataacaaaatactgcaaactgaagggcttaaaaacaacagaaatgtacttgttacagatctggaggctggaaagtccaagagcaagacgccaacagatgtggtgtcttgtgagggtctgctctgtgattcataggtggcaccttctggctgtcctcacagggtgtaaggactaactaactctatgaatctcttctggggctctaaggacactaatcccaatcattagcctaggccctcgtggcctaattacctccccaaatccccatctcctaatattatcacctggagagttaagatttcaacatattaatttgcagggacagcagagagttcagctgggagccaaggagggggccgaggaacatgcctcttcaggcggtaaactcacagatggccaggaagcaggaagtgcaggagatgtcattccagagcctgtccttcaggagaatcatgcggtcctaccctgagccgtggtcatttggctcatccttcttccagttgctgtaggtcagcctcccacccgtcaagtatatgaactggccttcagttgcctcatctgtgatgcccaggaaggcagtgtctttggccacatcctggatggccttattctccttggcattcttgggggcagccactgtggcctggagcccagcacacagagccttcactttggagaaaggcatccgctcaccgttggtcatgaaaagcttcttcccagacattttccccaaggagaaggcttacactgaaaccacaaatggtgagtgaggctggctgggtttggagcccagcacaggacagtaggcaagcagtctgagttccctgggaagccagacctctgaaaaatcaccctatgcccagcagttcaggccagagcctggtcaggaagtaagcctcagctgcagagcctgggaaggggcatccagactcctgcagacagcccagactcccctgggtatcccaccttgaaaaagcatctgctaaaacctgccccagcacaggtacacatagggagacggtcttgggcctcactgcaggcttgggcaccaggataaggaagaggcagggacagacatcagagcacagtagatgacaaggaaggagcacagactttggagacaacagatctccatccaacccttcccctgccacttcccggctgtgtgacctgaaatgagtcactaacacttcctgcccctcggtttcctcacctgtcaataaagcaagttcaacaaccacaactgaggttgctgagaggattgaatgaaaccatcttatgggaaaatgccacccagcacaggccctggtgtaggacgagcgctcatgaattagttcccctcccacctcctccaaatctagggtgcgctgaagaaaagagtgagagccaagaacacattatgggcagagagaaagctcacacttcttcgtgtggtccagttctgatctcaggctctgtagctctccaagttggccagcttagcctcagcaactgcaacgcaatagggagaaggtatttatggagaagaccttaatttggagagtggagcattttgaaaaaaatgaagtggcttactaagacgaatgcttattccaggaaaataagaatgcagaagaaataaaaaggggaaaatgactacattcctccttcccagctatacctccgcatcccttcacaacctggaacttcagtcctggacccccgtctccacatacggcttgcatattgtcatattgtaagaattcataagaaaatactcaactcattactcttctttctgaaaacttttctttgtcattcattttcatttctcattccagatacactttttaatacctttattgttttgacaggctggtagacaaatatgaataagtgggttgtcattgttcttttgttcttactgaatttgctctattttactctgaactaagttgctgtgatgttctctgtcagccaggggtcctaagaagcagaccattttcatgcattcttgtgacaatggacataaacccaacccctaaagggcctatttcctcccgggcaccccagaggtgcacactggactgtttccgctgaagaaaagccggggcccatctgctaaagggcctgacgagggaatagccctacgtggcttgaatgtctgtacctgggcacctatgggagtctcctcaggccccaggtaaagctgagagggccgggggcactgggccaggaagcagaattgagcaccttcccacgaggcagcaggagaagcaggagaaggggacctcccagctggccctccagctccccaggccctggggctcccaggccacacatgctgaggtatgcctcttacctgaattgtccccatgatctcctttttggctccttggtcctggaattccaggagcccctgggtttcctgggggccccaacttcccaggagggccctgcaaacctctgagcccttgatctgttgcaagacaaagggaagatgacccagtggccagcagtcattttttttccaaaaagctcaatactccattcatgttcacccccggaacagccagcaagctaatggtgacccaaagaagaaagatgccccatcctgcatcctaggggagggcctgcaccaaggccagctctctaaccaggtgggacacccctctgtagggacaaccacacatccccaattcctgtgtggaaatatgggatcccagagagtcagcgagcagctttgttttagaggcaatggcattttacagggattgttctgagtgtagcatgggtcctgatgaaaggggagcctccccaagtctgtactcaaaccctcatttggaggagacacctgctggaggtggagattcagaaagacacagaccaaacctggatctcccttttccccactgggtccgtctcacccatctctgcctgggatgcattgggtctccagcacagcgctaggcagctctctacattagtgtcctcaccccatcctgcactgctccctcccaggcatttgtctccacagctaagcacctctgagcctccagagtcacaggttcttagggtagctttctccagatatttatttccagaaaaagcatgcatagatcttccaccagacaaacgcatgcacacacacacacacgcacacacacacgtacagggacacacacacagatgcacgtgcacatacctttgtatcagttcaatcgactacttccatttgtgtttcgtttattgcagggccagggtgagagactaaagacccccagcactgagtcacctccttcctctccgctcatttagaacctttgcaaatgtcttgtttgggcatctcaccaggccaggcacaaggagaaggggtatttgcagatgacttcaatccacagctgaatgtgggcattggcacctgctgttccctctgcctggacatgtccctgcatctctgcatgcttatttgttgtcactcagctttcagcttaaatattatctctggagaaaggtctttgctaacccggtaattttaagtagtcactctgtcagtgagttgtaattctctgttctaattttctgccgattgctgcttccatgtgggtctgttttgtttatttggttgcatattgattgatcacccaccccacccctgtagaacgagaagctcatgagaacaggggtcttgttccccagctgttctttctccaccaagaagagtgcctggaaacagagtcaatactcaataaacatttatggaacaaatgaatcctccagcagtgtgtcctcaaatcagccctcttctctctggctggagctaccatctgtgccccctttaccagtgatctcacttttctattctcagttcacctctctgtccccagggtgcaaaccagggctgggcacacaggaggactgggtgcgagggagaggagaaaggcagagacctcaagcagacaccagaccatctgtgctcgtccaggcctgagtttccagaagcgtccagttcttgtcgccagagcctagtcaagctgcccaggtcccggatacgatctttgatgcttgccttcctccaaactcacacccattctttgaaacacttcatgtcaccaaacagcttgagaagtttgtttttcccaggtggggagtggggtgggtcacttccctgtgactctgccttgtgataggcattttggcttctcaagggtcctcacccttgtgtactcatgtcatcaggccctgtccagcggccctcccggttcccattcagggggcctgccaggcaccaagaggtgcttccgtggtaaagaagatccctctcaaggctgtgtctcctgatgccattgacacaatgttgaagagcccataggcccagaggacaaaggactttcaattcgctcagcaaataggcagacctctgaggaaggtgggaatgtgaaactgacagatttgcgttgaaccagtatgctaactgtgctgcagagttagagaaagggtggtttgagcgggaagagggtagacaggaagtaaatacacctaggagcaaaggaacctgagaaagcctggattctggaggggataagattatcccccaaggatgtgtacccataggtctgtcctctcatagacctggggatgaatttatgttgctattacgactattacagaattctgctatttatgccaagatgaaaaattatgtttccagtgtctcagcgtggcatgatctcccgcactgtggagacataaacgcagtggagaatcacacccgtagcccaggcacctcagtggtgtctcagatggaggccaggcagatttgagttcaccatgggacaattaccaaatatagtaggggacaaacagagtgagagctgatagatatgacaaacctcagaaatagccctacaaggagtgtggaccctacctgacagataaattaatatgcacttcaaaagagggtataatgaaggaatgaatgaaaattatataattaaattaataaacaaaaataactatagagctaataaaatagaatactggttctttgtaagagacataaacttagcagatatggccatggtagtttgggttgtttcctccatgttgtaaaattacatctcaggccctttgccataggacttcacaaaggctcccactggagtgtgaggagtaaacactccagcccctttgctgtttggtgtggccatgtgaccctgagctgaaacgaagggagcagcagcttaacgtgtgcttacaggtttgctatggcctttgtgtttctttcccaatcatgagaagtatgtatccctggaaagtgatatggaacagtcatgaattcacctgaaagtctggagtccagctgactgctgctgaatccaggcccactcagctgaaatcagccaaagctcaacaaactggaagatccagagcagaaaataaaacgtttactgttgtaagctcttgagagggaaatttactgttgtgttagctgactgatacaatatcaatgattaatagaaaaggtataagaaattaacaaatcagcccaggcacagtggttcactcctgtaatcccagcactttgggaggccgaggcaggcagatcacctgaggtcaggagttcaagaccagcctggcaaacatggtgaaaccccatctctactaaaaatacaaaaattaactggacatggtggtgcatgcctgtaatcccagctacttgggaggctgaggcaggagaattgcttgaatctgggagggaaagttgcagtgagccgagatcgtgccactgtactccagcctgggctacagaacgagactccatctcaaacaaacaaacaaacaacaacaacaacaaacaaatcagggggaaaagggattattatactagtacagatagtactgacattataaaatcacactatgtacagttaattttatagcaacatatggaaaattggtaaaatctatattataagaaagtttagtattatttaagttggctcaagaataactgatatatcagagtaattgatatatcactaatcataaaatatagaaatggaagtcaaaaattaacaaccatacctccatcaacaaaatggttttaaggtgagttgtatcaaatcttcagagaagaaattactactctcttatagaaatggcttgtatccaaaatactacttagctgagatgattagctgaacatgtaattcagaatggataaggattgaagaaaagaagggaacttttagaaaatctaatttataagcagagaggcaaaaacacaatttaaaaaataactattaaaagtgctgggattacagtcatgagccactgtgcctgggctgatctgttaatttcttataccttttgtattaatcattgatattgtatcagtcagctaacacaacagtaaatttccctctcaagcgcttacaacagtaaagtccagccctgtattcatggttaatagcagtctctggaatctgacttcctacattcattggcccaagaactagctgcataatatttggcaaatcactttaacctctatatcccttgacattcttatttgtaaataggggagaataataacatctgtaaaatagggttaataagtttaactagtatagtgcctggcccataggatgtgtgatgagcatatatagcatcagaccaagtcgggtatatccaagggatgcaaggatggcacaacatcaaaaaataaatcgatgcaaatcacagtttaataaataacaggttttattaagagcctaattcagatccgtgcaatcttgaagcttgaagcctgttcccaaaactagtacatggtctgaaaattcttcatacatttttttcccagactcctgtaatgcaaactttctagggttgatttcaaacacagtccaaacagatgacattgtcctccagttttgtcatttcaccactcaggccatagagttgtggctcagattgaagctgttgcttcttgaagtgaagggtgtgcagtggcctgctctcttatttctttgcatgtgcagggggtagagagaatgctgttggtgccaatgttgggcaatatctgctcacaagaggaaccacatgtcagtaggtacactactgcctctcagcccacactgactggttgttggggacctttgtgtgactgattacaaatgacagctcctttcagcagctggttcttcaggaaagagactcaatgattgcctctagctgcatgtcccttaccctcaccattgcaccagtacacatttcagtccataatatcttgttgctgggatccctgagttccaggaagcaacttgctcatgagtagggtgtgaaccccaggcagctcctgtgatactggcattcacacagccccctaggagactcagtccacggtgctgcaatccacattgccccagaacactcctggtcacagctttgtccttcctcctcttctccccatgctccataaaatcagtccatctgctgggtccaaatgtcagaattttacaagagataaccaaaacagtgcatttggtgcagcacaccaacatggcatatgtatacatatgtaacaaacctgcacgttgtgcacatgtaccctaaaacttaaagcataataataataaaaatagaactagagaagcaagagcaaacacattcaaaagctagcagaagtcaagaaacaactaagatcagagcagaaatgaaggagatagagacacaaaaaacccttcaaaaaatcaatgaatccaggagctggttttttgaaaagatcaacaaaatagatagaccactagcaagactaataaagaagaaaagagagaagaatcaaataaatgcaataaaaattataaaagggatatcaccaccgatctcacagaaatacaaactaccatcagagaatactataaacacctctacgcaaataaactagaaaatctaaaagaaatagataaattcttggacacatacaccctcccaagactaaaccagtaagaagttgaatctctgaatagaccaataacaggctctgaaattgaggcaataattaatagcctaccaaccaaaaaaagtccaggaccagatagattcacagccgaattctaccacaggtacaaaggggagctggtaccattccttctgaaactatttcaatcaatagaaaaagaaggaatcctccctagctcattttgtgaggccagcatcatcctgataccaaagcctggtagagacacacacacacaaaagagaattttaggccaatatccctgatgaacattgatgcaaaaatcctcaataaaatcctggaaaactgaatccagcagcacatcaaaaagcttatccactatgatcaagtcggcttcatccctgggatgcaaggctggttcaacatatgcaaatcaataaacataatccatcacataaacagaaccaatgacaaaaatcacatgtttatctcaatagattcagaaaaagccttcaacaaaaacagcccttcatgctaaaaactctcaataaactaggtattgatggaatgtatctcaaaataataagagttatttatgacaaacccacagccaatatcatactgaatgggcaaaaactggaagcattccctttgaaaactggcacaagacaagcttgccctctctcagtactcctattcaacatagtgttggaaattctggccagggcaatcaggcaagaggaagaaataaagggtattcaattaggaaaagacgaagtcaaattgtctctgtttgcagatgacatgattgcatatttagaaaaccccattgtctcagcccaaaatctccttaagctgatgagcaacttcagcaaagtctcaggatacaaaatcaatgtgcaaaaatcacaagcattcctatacgtcaataatagagaggcaaatcatgagtgaattcccattcacaattattacaaagagaacaaaatacctaggaatccaacttacagatgatgtgaaggacctcttcaaggagaactacaaaccacttctcaacaaaataaaagaggacacaaacaaatggaagaacattccatgctcctggataggaagaatcaatatcgtgaaaatggacacactgcccaaagtaacttatagattcaatgctatccccatcaagctaccactgactttcttcacagaattggaaaaaactactttaagttcatatggaacaaaaaaagagaaggcattgccaagacaatcctaagcaaaaagaacaaagctggaggcatcatgctaccagacttcaaactatactacaaggctacagtaaccacaacagcatggtactggtaccaaaacagatagatagaccaatggaacagagcaaagaccgcagaaataacaccacatatctacaatcatctgatctttgatatgcctgacaaaaacaagcaatggggaaaggattccctatttaataaatggtgctgggaaaactggctagccatatgtagaaagccgaaactggatcccttccttatactatacaaaaattaactcaagatggattaaaggcttaaatgtgagacctaacaccataaaaaccctagaagaaatcctaggcaataccattcaggacataggcatggacaaagacttcatgactaaaacaccaaaagcaatggcaacaaaagccaaaattgactgacagatgggatctaattaaactaaaaagcttctgcatggcaaaagaagctatcatcacagtgaacaggcaacctacagaatgggagaaaatttttgcaatctacccatctgacaaagggctagtatccagaatctacaaagaacttaaacaagtttacaagaaaaaaacaaacaaccccatcaaaaagtgggcaaaggatataaatggacacttctcaaaagaagacatttatgcagccaacagacatatgcaaaaatgctcatcatcactggtcatcagagaaatgcaagtcaaaaccacaatgagataccatctcatgccagttagaatggtgatcattaaaaagttaggaaacaacaggtgctggagaggatgtggagacacaggaatgcttttacactgttgatgggagtgtaaattagttcaaccattgtggaagacagtgtggcgattcctcaaggatctagaactagaaataccatttgacccagcaatcccattactgggcatatacccaaaggattataaatcatgctactataaagacacatgcacacatatgtttattgcagcaccattcgcaatagcaaagacttagaaccaacccaaatgtcaatcaatgatagactggattaagaaaatgtggtgcatatgcaacatggaatactatgcagccataaaaaaggatgagttcatttcctttgcagggacatggatgaagctggaaaccatcattctgagcaagctatcacaaggacagaaaaccaaacaccgcatgttctcactcataggtgggagttgaacaatgagaacacatggacacaatgtggggaacgtcacacactggggccggttgcggggtgggggcctggtggagggatagcattaggagaaatacctaatgtaaatgacgagttgaggggtgcagcaaaccaacatggcacatgtatacctatgtaacaaacctgcacgttgtgctcctgtaccctagaacttaaagtataataaaatatatatacatataacagaatcagttatattagaagtattgggggaaaatgagaatccaaaagatggttgggtataagatcaacaaacagaaattaagagttttttttttaacaaatcagcaataattaatttaaaatctaataaaaatagtaacaatagcaaataaaagcataaagaaagtaaaaataatactaataagaaacaagaagatatcaattttcagaggcttgaagtatttgtctataaaattgggactatacacggtcctggatttttgatggtttgacttacaatttatcaactttacaatggttcaaaagtgatgtgaattcagtagaagccacacttcgagtacacatacaattattcattcacttccagtacagtattcaataaagtccatgagatagtcaataccttattataaaataggccatgtattagatgattttgcccagctgcaggctaatgtagtgttctgggcatgtttaaggtagtttaagttaagctatgatttttgataggttaggtgtattaaatgcattcccaacttatgatattttcatcttacactgtatttatcatgatataaccctatcataagtcaaggaatatctgtatatccttcttcttctttttaaaataatttgggggaggcctcaataatttgtgtgctgcatcctaagtgcatgcagaatggtgatcagattaaaatttttcattcataaaagactgagaaattgttccccttattctcattggttttctgagtgttgattcagagcttccttccacccaagaaaagcataaatgccaaagaagagtgttcacaggcgttgagggtggagaagtgggagcctttctgggacagtgttacaggagagaagtgggaggtgggacacatatgtagctgcctcctcaagcaagtagggacatggtctcattcctgcacagccctggggtatgggagtgtggtcccattccatgctgacctgaaattaggatgactcactgaggcctgggactgagccctgagtaccaccatcactgctgggctgcagaaatcattcaggtagctgtgtggaggacagaaggcatggtatccccacccacaaatggaccatgtggattcatgatgcccatgtgttcttccaaatggtgtctgtagctccccattctcctgcaccatctcagggaggagagcagttggcccctcccatcaaacaaagaaagcacatcttgagattgaattttccaatcttgaggaaagtgggggctcagagccagggttcatttgacttacaaaaatacagaaatgtgatatttcttggaaccagaacagaggaaacacatatgaaaatattgacgatttattacatacatttaagtcttctttgttcagctcagggctggggtggctgggagtatgagcttcagatccaggaagattggtttggatccagcctctgccacttgctctctagaataatactcaaaacatttcactcctccaagcttcagtgtccttataaaaaaaatggggaaaacaatactggccccatgacattgtgtgaagattgaataatacgtaataagctatattagaattgcttgtcaaggtgtgtggcacatggtatgtgctcagtcaatagcctctgtgtgtagtaacggctctggtggtaattttgctagctgagggtaatggtaataattgtgacaacaacaagtattttatccccattttatagatgaagacataggctcagggaaaaaaatccccaagagtcaccagttagcttgcctacctcaagacacatcctaagacctggcccatgttaattttaatgattatctgggtgaatagattaatgaaaggggaaagtggagccggtggtgtggggggtggtgtgaatgcccactgaagtctcaagtagggtgcagattcgtccatcagcagaaaattacttggatcacgtctgcagtggggggctcttccctagaggcataggccagctgccttcaggtcaggggactgagttggcatccaaagactcaaaggagtgaatcgtacatgtcagtcacagggttggcttgggcaccaccattctggggcaccactgggccctctgaccacctggagagcctgaccaggcctgccacagagacctcagagtgccagagaatctccactgtgtccttagctccacacagttaggacttctctgaagtctgcctctctctgtcattatgcttggctgggactgctcatcctgatggcactgggctgcagagggagagctaagggcaccaggaagcaggcactctgtgtgacttcggagggtccttctaccccaagacctcactgctaccatctgtaagtgaaggaactggaccagatagagaataaggagggttgcatctcatgccaaaggcaaaggttaggagtggctgcctggggtgcagtgctgggagggtttgcaaggggagtgtcaaggctggtcagtgattatggggaagagtcagggcccatcaggggaatgaagtagctaagggtgcctccagctctaatagccacaagtgaattctgttgaaagggagtttcagcatctcacaaaccaagtggagcttcaggatggaggctgaaggccagacaggatcctccctgtcctgtggcataaattcctctcagaactcacagatgatcagtcagtaccgcaggcagctcctgtcattccactgtgtacatctccaagcacttctcattgccctgacctatgagctcccctgggcaccggttcgtgtagtccacaggggcctcatctaggtagcagaagtctccagggctgggacccttggccagggccatgtaggcatacatgttgtacttcttcaaaaatcttgcaatggcctcgttttcctctggactcctagggacagcaatgcagctgcctgctctggcacatgcctcactaatggcatctaaatagaccaactgcctgtttgtgaagaagaccttctctcccactgccggtatggagccctgaagactgagggctgagagcagaggagtctgggtcaggcctctgatcactttgtctctaagccacctccctcacctgggctgtctgccatcaggctctctgcagcctctccatctctgcctctgtgtcgtttgtccctcccccaatcctagttttccaaattctcttctaggctctcatccatttattcattaatctatttaacaattacttattgccagaaatggtgcaattttctgggattcaatagaaagcaagattaggcagagaccttgctttcctaagtcattaggagtggatcgtgtatacttctgtcatctctgggccattcagaaacatcagaaaaggcaaccatcattcctttccgaagacctgaatgtccacactcttctcttcatcaaaaggatatgacaactgtaaatatatatgcacccaacaccagaacaccaagataaaaacaaatattattagatgtaaaaggagagacagactccaatacaataataattggggacttcaacagtttactctctgcagtgttagatcatttagacagaacatcaacaaaaaaaagttggtttaaactgtgttgcagaccaaacggacctaacagacatttgcagaatatttcatctgacagctacagaatacccattcttcttatcagcacatggaacattctccaggatacattgttttaggctacaaagtaagaatcaatgaatgaaaatattaaaattatatcaagaacttttttgaccacaatggagtaagaaggaaatttaaaaatttctcaaaacaaatgaaaatggaagcacaacataccaaaacctatggtagacaacacaagcagtggtaagagggaaatttataacattacatgcctacatcagaaaagtagaaagatttcagataaaaactaaaatgcatcttaaggaactagaaaagcaagaaaaaagccaaaccccaaattagtaaaaagagagaaattttaaaagttggagcagaggctgggcgctgtggctcacacctgtaatcccagcactttgggaggccatggtgagtggatcacctgatgtcgggagtttgagaccagcctgaccaacatgttgaaaccctgtctctactaaaaatacaaaaaaattagctggacatggtggcggacacctgtaatcccagctactcctgaggctgaggcaggagaatcgcttgaacccggtaagcagaggttatggtgagccaaaattggaccattgtactccagtctgggcaacacagtgagactccatctcaaaaaaaaaaaaaaaaaaaaggagtggaaataaacaaaaagtagagtaaaaaagtagtacaaaatatcaacaaaatgaaaagttggggaattttttgtttgtttgtttgagacaagatcttgcactgtcacccaggatggagtgcagtggcatgatcatggctcactgcagccttcaactcctgtgctcaagtgatcctcttgcttcagtcttctgagtagctggtactacaggcatgtgtcatcacacaaggctaagattttttttttagtttttcaaagacaagtttttgctgtgtttcccaggctggtctcaaactcctggcctcaaatgatccttctgctttaacctcagtgctggaattacatgcatgaggcacgatgcccagctgaaaagttgggtttgtgaacaaataaacataattcgcaaaccattagctagaaaatgtaagaaaaaaagagagaagacctatacaaaaatcagaaacaagaaaggagacattataactgataccacagaaagacaaaggatcattaaagacttctataaacaactatgtatcaacaaatgggaaagcctaggggaaatggataaatttctggattcatacaacctactaagatgaaaccaggaagaaatggaaagcctgaacaactagaaatgagtaatgaggtttaatcagtaacaaaaatctcccatcaaagaaaactctgggactggaaggcttcactgctgaattctaccaaacttttaaagaagaaataacaccaattattttcaagctatttaagaaaattgaagggggagaaattcttccaaactcattccatggggctaccattatcctgataccaaaaccagacaaagacacaacgttaccacaacaccaggggttcagtctaagtcccgctgctcgccacactgaaaaccaatcactgagacaatgagcattgccaaggaaaagggcttcaattgagttctgctgccaaagagatgggtgatcagtctcaaatccatctccctgacctgctaaaattaggttatatagcagtgaagaaatgtaaccatgtgtgggataacaggaatcagggagggctaaaaaagaggagtggtcaacaggaagcaggtggtcagttaagcagtcatgacaggtaataagtctgatgtctcatccaaatgcagtgatctggtgagtttcaactccttaatactgtctgggagagctgatggttgttttcccaagaaaggaactcagataagataaacgtaactttttcaagtttttaagactaggaggatcagtttctatgcttattcaaagaaactataaacatcaactctatgagacaactggataggttttcagggttcaacttaggtaaatcaattaatgtgatacattttacatcaacagaatgaaggagaaaactacgtaatcatctcaacagatgcagaaaaagcatttgaaaaaatttaacatcctttatcataaaaatgctcaacaaatcaggtgtagaaggaatgtatttcaaaacagttaaggccatatatgacaaatgcacagctaccatcatactgaatggggaaaattttaaagcttttcctctaagatcttgtacaagacaaggatgcccactttcactactcttattcaagatagtattagaaattcaagccagggcaaccagtcaagagaaagaaataaagagtatccaaattggaaaggaggaaataaaattatccctgtttgcagacaacacaatcttgtatatagaaaattctaagtactccaccaaaaaacacttaaatctagtaaatgaattcagtaaagttgcaaaatacaaaatcaacatgcaaaaatcagtagcatttctataaatcaataatgggctagctgagaaagaaataaaaaaatcagtccgatttacaatggctacaaaaagtgaaatatctaggagtaagttgaatgaaggagtgaagaatctctactaggaaaactataaaacactgaagaaaaaaactgaagaggatacaaaaaaacagaaaacactaaagaaaaagaactgaagaggatacaaaaaaatggaaagacatctcatgttcaaagcttggaagaattaatattgataaaaatgaccttactacccaaagtgatctacagattcaatgccatccctattaaaataccgatgacattcttcacagaacaagaaaaaataatcctggacaggtgtggtggctcacgcctataatcctagcacttgggaggctgaggcagaaggattgcttgaggtcaaaaattcaagaccaacctggccaacatagcgagaccccatgtgttgcaggaagtcagggaccccgaacggagggaccggctgaagccatggcagaagaacataaattgtgaagatttcatggacatttattacttccgcaatcaatactcttgtgatttcctatgcctgtctttactttaatctcttaatctcgtcgtctttgtaaattgaggatgtatatcccctcaggaccatgtgatgattgcattgactgcacaaattgtttgtagagcatgtgtgtttgaacaatatgaaatctgggaaccttaagatcagggtaacagcgattttcagggaacaagggagataaccttaaagtctggctgcctgtgggctgggcaggacagagccatatttctcttattaccgaaaacggataagataaatataactgaattatttcggtaaggaatattaataatttactgccctgggaaaagaatgcattcccgggggggcctctaaaatggccgccctgagaatgtctgccttatgcagatgtagatagggatgaaacacgccctagtctcctgcagcatccccaggcttgctaggatttaggaaattccagcctggcgaattctagtcagaccagttctctgcccttgaaccctgacaatgcgtgcacagcgggacatggaagttcattagtgattctagttttgccctgaccttctgccttgtgatcttttgttgcccttgaagcatgtgatctctgtgacccgcaccctactcctacactccctcacttttgaaaattgctaataaaaacttgctgcttttacagctcagggggcatcacagaacctgccaacatgtgatgtctcccccggacacccagctttaaaaatttctcttttgtactttttccttttatttctcagactggccgacacttagggaaaatagaaaaggactcatgttgaattattgggggtgggttcccccgatacccatgtttattttaaaaaaatgaaaaagaaaaaaatcataaagtttgtgtggaactataaaacaccaagtagtcaaagtaatcctgagcaaaaaatgaaaagttgaaggcatcacattacctgacttcataatgtactacaaatctatgataaccaaaacagcatagtactcgtataaaaacagatgcatagaccaatggaacagaatagagaacacagaaataaatttacatatttatagccaactgatttctggcaatggcaccaataacatacattgggggaaaggacaataaatgttcaataaatggtgctgggaaaactgaatattcatatgcagaagaatgaaactagacccctatctcttatacattaaaaaaaaacatgaaatggattaaagccttaaacataagacccaaaggtatgaaactagtaggaaaaagcataggagaagtgcttcaggatattggtctggatgaagattttatggagagacctcaaaagtactgggaacaaaaaccaaaaataagccaatatggttatatcaaactaaaaagcttctgcacagaaaagaaaacaatcaactgagtgaagagacggcctgcagagtgggagaaatatccacaagctattcatccaataagggattaatatcctgaatataaaaggaactcaaacaattccacagcaaaacattcaaataatccaatttaaaaataggcaaatgatctgaacagacacttctcaaaagaagacataaaaatggccacgtatataaatgacactcaatatctttattcctaagataaatgcaaatgaaaccaaaataaattatctcaccccaggtagactggcttttatcaataagacaaaaaagaataaatactggtgcgggtgcagagaaaagggaactcatacactgttggtggaaatggaaagtactacagccattatggaaagcaaaatgaagctttcttgaaaacctaaaactagaactatcatataatctagcaatcccactactgggtattcaaagaaaaggaacccagtatgttaaagaggtatctaccctcctatgtttattgcggagctattcataatagccaagatatggaatcaacctaagtgtctatcagtgaatgaatggatttaaaacatgtagtaactaaacacaatggaatacagttcatccataagaaagaataaaattctgccattcatagcaacatgggtgagccattatgttaagtgaaataaagccaggaaaagaaaattaaacacagcatgttctcactcatttgtggatgctaagaaaacttagttaatctcatagaagtaaacatagaacagtaagtaaacagtagaacagaatatattagaggctgggaagattaaggggaatgagaaatgggaaaggtggggcaatgggtacaaaattacagctagataggagaaatgagttgtagccttctttagcgctgtagggtgaccatagccaacaaaaaaattatgtatactttcaaatagctaaaagagaggattttgaatgttatcaacacaaaacagtaagtttttgaggtgatgaatatgctgcttaccttgatttcatcattgcacgttacatacatgtatcaaaatagtccactgtgcccatatgtatgtaaaataattgtgtcaaaaataacattttttaaattaaaaagatagtaaagaatatattaccagaagtaaaaacaaacaaactccaagaaaagactatagttacaattatatccctatgtgtcaatctgaaaagatggctggcatatgtaagagaaaacactaattgtagaacagtatatgcagtatgatcttattggtgcaaagtaagagaatgtgtgtgtgtgtgtctgcacgtgtgtgttcctgagcctatttctttgaagacagttgctgccacctgccagtttcaattcctccaaggtgcagaatgggaaaacctctctccctctcctcaaaacctcagtaaagcatgatgtatttctctggggtttggaaggttcaaaatgttcagggcagaaagaagggtgacaaggctgcattggcaaaaatgaaaataaaaacaagtaatgtgatttttaaggcaaattggatgctatttctaggcaacagaaatatatttacagtgttattctttttaaaaataaaatggcattattagagaggcatcaatgtaatatatatgtatgtaaacatacagcacacaatatatgtgtgtgtatatatatgtatataatgcatacacacatatttgcttagtttgctggctgcctcagcaaagaaaagcctcaacttccatccccttcatgtggctgagctgtcccttagattctgacattataagcgattttgaaatatatccatgattagtaaattaatttgtgcattcccttgtcttcatgtacaggtagaataagcatgttcctctgactctgggaaggttctagcagaggactgagctggaaagaagatttctggtaattctggcaatccatgtaacccctgtcatcctcagctgactgaagtatggaatggggatttactctctgtacaactcatagagtgctgtgatgatccaaagtgacagaaagatccagcagtcacagacagcctcctcctactgctagcacccagggcagctggaaaagggggcaggggaagggtcccctgagcactaagagagaggcctcaaatatgcagagaagcccatgcactgtccttagtgcctgtacatggcctccactctgcacccctttgaaacgggagagtcccctgatccccctcacaggatgcatgacaggggtgtggctcacctgtttggttgccccactgctcaaacccctagggggagcatgcagatgggcaggttcagaggctggggtgagtgctttgggctccagctgttcagtagagtctagggatgggtgcctgtaatcctggtgttacaaaactctttcagttttgcatacgcaggtggcttgagtgttaatcagctcaatggaccctctgccttatcctaagggcagagggcctgtgtgacagctttctgtatcccaagctttcacccagcatcctggaagaatcagatcacatgtgggcttgaaggatgagtgcaagattttattgagtggtggaggtggctctcagtgagatggattggggactggaaagggaaatggagtgggaaggtgatcttcccttggaggcgggccatccagtagctggtatcttctccgatcgcccctgggcaaactcccctcagtgttcagatgttcctcctcttctctctctctctgccacgtcgttccactgtccatctgcttgtctgctagtctgctggtctgcttctggagcctggggttcaaggtttatatggttgcaggataggggttgtggcagaacaaaaggcaactttttggtcatgaaaacagaaatgtcttttctcatttagggccacaggtcttcaggcttgagggtggggtctttgttggggagtcaccctttttttacccagtgtgtcactgtctcctgtcattatcattcccctcctctgaagaggcacatctaactgcctttagaatatggacgatgacaagtcttagctacttcctgctgacagggggagtttttttggggaaaatgtcagtcagattcctcccagacgtctatctaaaggtccctgacaaaagggagccatcatctgaggctctgattgcctgatcatcttgagtttgataacctctaagtgagagaggaaaaaaaaagttttataagattaagtaggcatgggttaaaattgtgtattatacaaggaaagaatctagtgccaaagattacagaaataagaagtaaaatatactaattaccctgaaaacactattgtaccccgtggtatagaacagaacaaaggtaagaaccacaagcataggcaagactacaaagaggacatacatgaaatgttaattaacactaaccttttgtgatttttagtttgagtaccctgatctcttcacaatggtattttggatgctcctctaggttgaaagaggtgactctgttggcttcccaggcctttacttgagtataatgaatccaagagtctattctggtgaccttgaccttcaccaccacaggagtgaaaagaagtacagtgcaaggtccctcccaaccagggcatattgagagagaaaggtaaggaagtacctttaccagtactaggtcccctgggttgaatagaggtgggcctggttcgtgggattgggccttcaacagttgtttcagttcctgttggaaatggaccaaagaggttatgtgcttaattaaaacaaaggtttcttggtctagcaagaaatcattcatgagaaaatgtcatccatacatagtctcaaagagactcaaacccagacttgaaggagtgtttctgatatatagcaggactatggaaagaagagtagtccaggggagatgagtctcctgagacagtttcttgaggtgccttttgataatatcatttttgtcttttctacctttcctgaggattgtggtctccaaacacaatgaagatggtactgtatgcctagtgcctttgagaccccctgggtgacagctgccttgaacgaggggccattattgctctggaggtacttagggagtccaaagtgaggaattatctcattgattagtactattatcacctcagaggctttctctgtctgacatggaaatgcttctactcagttagtgaaggtatctatccacactaggaggtactggatgccccttacctttggcatatgggtgaaatccatttgccagtcttcccctaggtagccttggagaagacactattaattaaggggattgtttttaaggcaggtcttgcaagcattaacaacctgtttaactgtttgtatcaggtttttatctgagaacaatctgagccagtcagtaggttttatctgtacctaggtggaaggcctggagaaggcttttaagaactttccattggttgccagctggtagatgaagcatgccatcctaagaggtgtcccattctatttccataggagagtattgaggttttatttctctgatgggggccctccaagatcagtaaggcttcaagtgggtcagagacctggggcccccttgctgctgctagctgctcagtctagctagctgctcataaagcagggtgtgaaatagttactctgaatgatattgttgagagcacacctctctcctcaggcacaagtgctcaactggccaaactaattaccctcatgagagcacttgaattaggcaaaggaaaaacagttaacatttatactgattctaagtatgctttcctagttctccacacccatgccactatctggaaagacaggaacttcctcacagctaatgggtatcccattaaatgccatcaggaaattaatagactattttgctcagttttcctcccacaggaagcggctcagcccctagctgctcagtctgccagcccgtttccctcagctatttcatccatccctctttggtggcctttacaatgtattactgccacttcctgtgcgtaagaatcccctcggttgcttgagtgtttggggaggagaaaggaggagataggtttaatcctttcttcgcccaatgccctggtcccctctgacaagaccaggcttaggtgcttcactgaagtctgacagagctgagcttcagattttgaaacattatatcctctgttagcaagaaaattaagaggagccttactgcccttctgagagatttcctcagttggagtgcaaaagagaaggtcctccatgtattgcaaaactttgacctgaggataaaggaacttggagagatctctccataatgcctgcccaaacaagtgggagctgtcttggaatccctgaggtaacattgtccaggttaacagggtggtttggttagagggatcctcaaattcaaacaaatactgggagttgtggtataatggtatgcagaagaaggcatcctttaggtccaggaaccatttagttccctcaggtatttgagctagcagggtatacggattgggaatcattgaatgtattggaaccacagcctcattaacaaggaggtggttctgaactagcctccatttctagttgggtttttgtacccccaatattggggtattacaagggctattgcagggtttgagtgggccctccatcttcaagttatcaatgatggcttctagtcctttcctaacctctagtttcaggggatattgtttctggttaggaaaggaggtgggatccttaagatggacccagactggtatggtagttgtggctctgacaatcttccctagagttgcccaaacttctgggttaatattggtctctactaggatgagacaaagagtttccctaggggccatcagaatgatggtccccacatgggccggaatatccctacccaacagaggagttgggctttcaggcataattagaaaagctttggtgaacaaccccaggtacagctaaggggttggaaaaaatatcgggttaaagaccttcctgagatgtccctcacagtcatgctaagagaggagagggggcctggattcaagaggagaactgagagaccagtcccagtgtccaaaaggaggtccactttcctctcttcgatttccatgattacccagggcaccttgatgataatggtggtctggactacaggagccaggagaggagccctgggacctgtcagtcctgctgctggaccatttggaagactggctctggacctggtgaccagcatgcccaggaacagtccaccctccagtggtccccactgcagattggacagggttgaggtagcttcctcatgctgtctgagaaattcttgaaatgccctgatttgccacatctgtagcaattgacaggtgcaccctgggaattctggggtttgtgggcttgtctgctggccattaaagtctctgtctctttcctgtatttcctctctctcttgtgcctacctatctctattataaaaaaccaaggtgggtactttcagaaggttctctaaagtactctcttgtcccagagcctgttttgtagcttcctcctgatatcaggggctgcctgagtagtaaatttatgctttaggattggttgtccctcagctgaatcaggggatagacaggtgtgctttactaaggcctcccttggcctttccaggaaggcagtgggattttcatcaaatccctggtcaatcatggatgatttagtataattgagaggcttggtcctggtcttacataagccctccattatgcacacctgaaagtgcctcctcttccaggcttccatcttgtcattggaatcctatttagggtaatccattgatactgcttctctcccagttggataatgtttgcccccttccctgacactatatgtgatactaagctcatccccaaatctctctgctgcttgcagagcagcctgcttctcagtgtctgtcaaggtctggttcaaaagcaacataatgtctctccaggagagatcaaatatttgggtgaaattctggaaagcctctatatatctgtcggggtcatctgaaaagttcccaagatcccccttaattcactttaagtcctgtagggaggaggggaactggaccttactgggcccaaattcaccaggcattggttgaaggggcaagagtgaggttggggcttgtctagggtgaggatttttaggagggggcaagtgagaggctgaagctgaatagggaggtcgaggtagacccagaggggaagagctggagggggctggcttctctgcttggggtgcctctgggattcatatctttagtttcctaggcttgccccttgcagtcctccctgagatggcaagcaggagggctgtatcaatcctacactgtcagcaaaggtctggattgccttgcaaggtatagaaaacctgcacatatgggacctcagaccatttgtcttcatgtatacagaaaaggcctgatcaccggatactatcgaaatgaaaggttcattcctgaggtccacccggtccttcataatttggccaaacctttgtgcagagggctatgaggcatttttcttccagattaagaggatcaaagcagtcccattggttctggatacactccagaggggtataagctgggagtggtgaagagagatggttgcctattctgaaagacagagaatagaggcatgcctcattcccttccttctttagtgaaaactcagggtgtgatggagagagaaagcaagactgtggactctgaggtggcttggcatgggcgcccaaggactggcagtgtgaagaggatatccctgcagagggaagaagcccaacgtggagggtgaggccccgaggagaacgagaaagatactgaaggagagcggactggaccggcgggggcagtggagcctaagcagggggaggaggctgtggacacagctgagtggcctggtgtgggcactcggaactcagcaggaactacagcaattcttagagctaagagtgacaaatttgtgttgggagaaccatcttcttaacgacattctttagattcactggtgccatgtgctggcaaactgtaactgtttcaacatcaaacacacgtagtgccccctgcagcccgcaggtgggtgctcggcaccccctggtggtcagtggtaggcctcacgaacgagtccacattgctacaaatcaatcaatgggcaacagagacagtgtgatgaggaatgggatctttacaatagccccaaagtgcgtcctcataacatagtcactgattaaaaccagaaaaagaatgtatttatggtagtgaagcgtgacacccaccaccttaattcaatgatcaacaagaacatcatcaatcttggggcaaactaaagtcacatgccgcccggtagaatgggagaagagcgcagcaggatgtctatcgcatttctgctgaagttacagaacctgaatctaatcatgagccaatacattaaaaaaaaaaaaaaaaaagtgaggggcattctacacagtaactctcctgtgatcttcacactgtgttcaggtcatgaaggtgaagggaagacagagggcctttgtgggtttcaggaccctggagaagcgtgacaaccgaatacggcacatggctcagaaatggatcctttgctataaaggacactattggggcattgggtacattttgcatagggcctgaaggctatttggagttattatatccatgttaatttcttgattatggttataatgcgaaaatgcctttgcatgaaaaacacattaaagtattggggtgttggggtttcatgctgacaacctactttcataggttcagggaaacatatttgtaccgtgcctgcaattcttctgtaaatttgatgtttcaagataataaaaacaaaaaggaaactgagcctcaaaatgttacataacctgactgagtccacatgggtaataagtgacagctctgggtgaaaactcaggtgtgcctttcccctaaagtcacgccctgccctgccaaccacaaggccctgcacatctgagttggcctctgttcctgctcatcacctgcaaaacagccctgcctccccacagccaagttgctggagctgcgccccacctgcccccaccctgcactggcctgactcccccattccacacctggcccagcacccaccacatggtgtggcagacagcactggggcagctgaaagactccatgctacaaattggcactgcccagcttcctgcttctgggagtggggtccattggctgagcttccgctccctggaagagctccagactcctcaatggtttgggatttttcaaaccaattccaaataagccaggggagattttcctgtcttggttcccatcattaccacctccacagttggagattccctcctaatccagatgctcaaaccaggacctcaacaactagggcttcatatatcactgggacacttagcataatcaccattgcaggttgccagacatcacccaaagtgatgttctaccaaagacagaaactgcagctctcccgtgaccttccaggtgctgccctgactcctccagctgaacctgctagggcagagggaagtggaacgtgcagcatatttgcctgccactctgcccatgtgcccaccaactcagctgcaggctccagggacacaggctggtgggggggcctggggctcatggctgagccaggtcgcaggacagacaagttggcctggatcaacctgaccaatctcagctggagcagtgagttcttcattgtctgaatctaaaccaggaacccagtggggcttccttagtgcctgtgtaagggctctcggctttcactgctaaggagcttgctaggggcagggtgggtgacctcagccaagggggggatttctcttcttacagacctggagttcctctttcgcaggttctgtgctcccctcaagggtcctttgagatcctccagcctgagtgctcttggggaaacatgctgtgtaaacactatgcccatttcctgcctggagcacaggttttgtggtagggctctcaggggtgaggaggaagcctggcagcccccacatctataaatgctgcgtctaccttaccctctgacttggaggcagagacccaagcagctggaggctctgtgtgtgggtgagtttagccccatcccctaggtgttctccagcttgaggatcgcaggcagagaggaccagcccagcagccacaggcctgaccaaagcccaggctgggaaggagggcaactccccattttccactgggaggtgtttcacagcacagtcaacataggtgacctgcaaagatcctcatgtttgttattttctttggccagatccatccctacagggttcagcagggcctacaggaggggcagtgagagaacagaccccaaaaagaaaggggactccatgactgaccaccttgaggggggccaggctgcgggccccgttcatcttttttcattctcaggtcgctgatttcttggagcctgaaaagaaagtaacacagcagggatgaggacagatggtgtgagtcagtgagtgagtgacctgactaatagcctgggagggacagggcaggttttctgcagagcacggaagattcagctgaagtcagagaggtgaagccagtttcccagggtaacatagtgaggcactgaaagaaaggagactgcactggagcccaggtccccgggctccccagagctccttactcttcctcctcctcagcagcctggagaccccacaacctccagccggaggcctgaagcatgaggccatgccaggtgccaggtgatgctgggaattttcccgggagcttcgggtcttcccagcactctggtctcgcccgccctgcctctcgggctctgcccagcttcctgagtcctgacagagcacagtgggggagatgttggcagaggtggcagatgggctcacggccatccctcctgcaggagcagcgactggacccagagccatgtggctgtgccctctggccctcaacctcatcttgatggcagcctctggtgctgtgtgcgaagtgaaggacgtttgtgttggaagccctggtatccccggcactcctggatcccacggcctgccaggcagggacgggagagatggtctcaaaggagaccctggccctccaggtactgtgctgcagaccccaccctcagctgagggacacagaccccttttcaggaggcccatctgtccaggcccctaggctgtgggccatagtgagctgggggctatagtaagctgggtgggacttcagtctgcagggctggtgggttcctggggcccttatgatggcgcatcctggagagtctgtcctcatagtgcccacggagtgatagagtgatagctgagccagccctggtgataatgggcatcgagtctcactagctccaaccagttgtgggtgacagatcctacacatccatgtctcttttctctgcaggccccatgggtccacctggagaaatgccatgtcctcctggaaatgatgggctgcctggagcccctggtatccctggagagtgtggagagaagggggagcctggcgagaggggccctccaggtgagcagggtggggcaggtgggcagtggaaacatgggcacagcgaccctgaagtcagttacacggggatgatggggatcagacaaaccctacaggttccccaagggcatttggctcaacctaagtaagagaggataagcttgagggagaaagctgaggtgtctggggagtgtggtcacaattcagggaaaggcaggtgtgggaagtcctccgtgcctcatgaccaccgatggggacacactgagtcaggtgtgggatgagggacagcactgggaggcaggggaggcatgtcctgggatggaggccctgggggctgtctgaagggtgaatgcggacgaggcatccagacagacggtgtgatcaggagccccacagacagaggggaactttgaagctcagagcggtaagcaagtccatcagggcagtgcagagagcatcatgcttgcccttggtggagggtgcgggagagggacttgccccacagaggcgggcagacagaacccctcgagggacagagcaggaaagaggacaaggggtgggggtctcagcaggggcaaggcttcactaaagaataggggaccacggggtgtggagacacactggaatcttgtggaccctctgagcctagggtctgggtggcgcctaacagcaatgaaagggcagagttccaggattgcagatggcaaaacacctgcgtggcagcaagtgggagtcttcactggcctgcccctccttctgtgtggggcactctccacagggcttccagctcatctagatgaggagctccaagccacactccacgactttagacatcaaatcctgcagacaaggggaggtaaggggaccccctgggcctcacggggtaggagtttcccacaaattcccctcattctcagcaccagcttctagaacatagagattacaaataggcatgcacatgcaggtcttggggaaaggaatgacgcttgcttttctgatgtctttgaatggcccagaggagacagaagcagacacaattcactccccatttcataggaaagcaagttctccacctgccttgctttccactgaattccaggaaattgcaccatttctggcaataagtaattgttacttaggtgaatgaataaatggaggagagtctaaaagtgaatttagaaaactgcaattggaagaggaagagaagacacagagagaggcagagatggagagactggggagaatctggtagcagagaccccaggtgagggaggtggcttagagacaaagtggtcagtggcctgacccggactcctctgctctcagccctcagtctgcagggctccataatgacagtaggagagaaggtcttctccagcaatgggcagtccatcacttttgatgccattcaggaggcatgtgccagagcaggcggccgcattgctgtcccaaggaatccagaggaaaatgaggccattgcaagcttcgtgaagaagtacaacacatatgcctatgtaggcctgactgagggtcccagccctggagacttccgctactcagacgggacccctgtaaactacaccaactggtaccgaggggagcccgcaggtcggggaaaagagcagtgtgtggagatgtacacagatgggcagtggaatgacaggaactgcctgtactcccgactgaccatctgtgagttctgagaggcatttaggccatgggacagggaggacgctctctggccttcggcctccatcctgaggctccacttggtctgtgagatgctagaactccctttcaacagaattcacttgtggctattgggactggaggcacccttagccacttcattcctctgatgggccctgactcttccccataatcactgaccagccttgacactccccttgcaaactctcccagcactgcaccccaggcagccactcttagccttggccttcgacatgagatggagccctccttattccccatctggtccagttccttcacttacagatggcagcagtgaggtcttggggtagaaggaccctccaaagtcacacaaagtgcctgcctcctggtcccctcagctctctctctgcaacccagtgccatcaggatgagcaatcctggccaagcataatgacagagagaggcagacttcggggaagccctgactgtgcagagctaaggacacagtggagattctctggcactctgaggtctctgtggcaggcctggtcaggctctccatgaggttagaaggccaggtagtgttccagcagggtggtggccaagccaaccccatgattgatgtgtacgattcactcctttgagtctttgaatggcaactcagccccctgacctgaagacagccagcctaggcctctagggtgacctagagccgccttcagatgtgacccgagtaactttcaactgatgaacaaatctgcaccctacttcagatttcagtgggcattcacatcaccccccacaccactggctctgctttctcctttcattaatccattcacccagatatttcattaaaattatcacgtgccaggtcttaggatatgtcgtggggtgggcaaggtaatcagtgacagttgaagatttttttttcccagagcttatgtcttcatctgtgaaatgggaataagatacttgttgctgtcacagttattaccatccccccagctaccaaaattactaccagaactgttactatacacagaggctattgactgagcacctatcatttgccaagaaccttgacaagcacttctaatacagcatattatgtactattcaatcttcacacaatgtcacgggaccagtattgtttcctcattttttataaggacactgaagcttggaggagttaaatgttttgagtattattccagagagcaagtggcagaggctggatccaaacccatcttcctggacctgaagcttatgcttccagccaccccactcctgagctgaataaagatgatttaagcttaataaatcgtgaatgtgttcacatgagtttccatagctttggttccaagaaatatcacatttctgtatttttgtaaatcaaatgaactctgactctgagcccccacttgcctgaagattggaaaattcaatctcaggatgtgctttctttgtttggtaggaggagccacctcctctcctcactatgatgctgcagagggatggggagctacagccaccatttggaagaacatacgggcttcctgagtccacatggtccatttgtgggtgggaataccatgtcttctgtcccctactcagccacctgaatgatttctgcagcccagcagtgatggtggcactcagggctcagtcccaggccttagtgagccatcctagtctcaggtctgcatggaatgggaccacactctcatgacccagggctgcgcaggaatgagacaatgtctccaattgcttgaggaggcagctacatatgtgtcccacctcccacttctccccctataacacctgtgaacactctttctcagtgcatttattgcttttcttgggcggaaggaagctcagaaaaccaatgagaataagaggaaatttttctcagtcttttatgagtgataatttttaatctgatcaccattccatatgtgcttaggacccagcacagaaattattgagccttcttcaaaattaagaaaaaaagcaagtagaagcatgtacagatgtatctcgaatggggtgacatcccaataaacacattgcaggatgagaatatattaagtggaaaatgcatttaatacacctaacctaccaaacatcatagctgagcctggagtaacttaaacatgcccagaaaacttatgttagcctgcagttgggcaaaatcatctaacacaaggctgattttataatgaggtgttgactgtctcatgaaatttatggaatgctggactgaaactgaatgaataattcagttatatgtgtacttgaagtatggcttctactggatttgcattgcttttaagtcattgcaaagtggaaaaattgtaagtcggacagttgtaaatccaggacagtctacattcccaattatatagataaatactttaagcctctgaaaatttgcatctattgagataatcatgtggtttttgtctttagttctgtttatgtgatgaatcacttttattgatttgcgtatgtggaaccaagcttgcatcctagggatgaagtttacttgattgtggtggataagctttttgatgtgtcacttgattcggtttgccagtattttgttaaggatttttgcatcaatgttcatcaagaatattggcctgaagttttcttttttgttgtatctgccaggttttggtatcaaaatgatgctagccttacagaatgagttaaggaggagttgcttcttttcaattttttggaatagttttagtaggaatggtaccaactcttctttgtacctctggtagaattaagctgtgactccatctggtcctgggatttttttggtgggcaggctatttattactgcctcaacttcagaactcattatttgtctattcagggattccatttcttcctgattctttcttgggagggcgtatatgtccagggcatatttatccatttcttctagattttctagtttatgtgcacagaggtgtttatagtattctctgatggttgtttgtatttcgtggggtcagtggtgatatcccccttatcatttctgattgtgtctatttgaatcttctcttttcttctttattagtctagctagtgatctatctattttattaattttttcaaaaatccacctccaggatttgttgatatttttaaggtttttcgtgtctctgtgtccttcgattctgctctgatcttggttatttcttttcttctgctagctttggggtttatttgctcttagttctctagttcttttagttgtgatattaggttattaactttctaactttttgatatgggcatttagtgctataaatttccctcttaacattgctttagctgtgtcccagggattctggcatgttgtgtctttgttctcattagtttcaaagaagttcttgatgtttgccttaatttcattgtttacccaagagtcatacaagagcaggtttttcaatttctatgtagttgtgtggttttgagtgaacttcttcatctcgagttctaatttgattgcattattgtctgagagactgtttgttattatgtcagttctttttcatttgttgagtgttttacttccaattatgtgatcaattttagagtaagtaggatgtgtcaatgagaagaatgtatattctgttgttttggggtggagagttctgtagacatctaacaggtccacttgatccagagttgagttcagatcctgaataactttgttaattttctgtctcaattatctatctaatattgtcaatggggtgttaaagtctcccactattatgtgtgggagtctaagtctctttgaatgtctccaagaacttgctttatgaatctgagtgctcctgtattgggcacatatatgtttagaagagttatctcttcttgttgaattgaactctttaccactatgtaaggctcttctttgtctttttttatctttgtaggtttaaagtctgttttgtcagaaactaggattgcagcccctgcttttttctgtttttcatttgcttggtaaattttcctccatccctttattttgagcctatgtgtgtctttgcatatgaaatgggtctctttaagacaacatactgatgggtcttaattctttatccagcttgccattctgtgtcttttaattagggtcatttactccatttacatttaagaatagtattgatatgtgtggatttgatcctgtcatgatgatgccagctgcttattttgcagacttgtttatgtggttgcttcagtgtcactgctctgtgtactttggtgtgtttttgtagtggctggtaacagttttcctttccatatttagtgtttccttcaggagctcttgcaaagcagacctggtcatgatgaattcactcagcattttcttgcctgaaaaggattttatttctccttcgcttatgaagcttagtttggccagatatgaaattctgggttggaaattctttttttaaaggaagttgactgttggcccccaatcttttctaacctgtggtgtttccactaagagattcacagttagtctgatggacttcccttggtaggtgacctggcctttgtctcaggctgcccttaacattttttctttcattatgaccttggagaatctgattattttatcttggaaatgatcttctcatggagtatcttactggggttctctgcatttccttaatttgaatattagcttgtcttgcttggttggggagtttctcctggatgatatcctgaagtatgttttccaacttggttccattttccccatcactttcagataccccaatcagtgatagattcagtctctttacataattccatatttcttgtaggttttgttcatttcttttcattcttttgtctctatttttgtctgcctgtcttaattcagaaagcaagttttccagttctgagattctttcctccacttggtctactctgctattaatacttgtaattgcactgtgaagttcttgcagtctgtttttcagctctaacaggttggttatgttcctctcaaaactggctgctttggctgtcagtttccatatgattttatcaagattcttagcttctttgcattggattgcaacatgctcctttagctctgtgaagtttgttattacccaccttttgaggcctacttctgtcattcagacatctcagcctcagcccagttctgagcccttgctgggaggtgttgcagtcatttggagaaaaaggggcactctggctttttgagttttcagcatttttgcattgattctttctaatctttgttggcttacctacctttgatctttaaggttactgacctttggatggggtttttgttgtttttctttgttgttgttgttgttgttttccatctatttgtatttcttttaacagtcttcccacccttccatagggctgctgtggtttgctgggaggctgctccagaccctagttgcctcagttcttcccatacctggaggtatcaccagtgaaggtggtcccagggagagatcagagctctgtccgtaatatgtgccagtgggaatggctggaaggcctggctgggaggtcccactaagtgaggagaaatggatcaggtccctgctaaaagaagcagtctggccaccatctgtcaaagcaactacattgtgcttctgcggggattctttcttgtctggactgtgtggactttccaaagcccatagactgaaagggctgagtcaaccctcctccctggggctccattctgtctcaggcaggctccatcctgttactgatggcaacctggaattccaagccagtgggtattatctcgcgaggtaccatggaagtggagcccatggaatgaggctgctcaggctccctggattttacccccttcctaggggtatgtgtggacctcccacctttgtacctctgagttgcagacacagtttttggggatcccggggctagggcatataaaactcctaagtctctgtgtgtgcatgagtagctgctctgccaagactgcacacagctctgtgtgtcagacctggcatgggctcatgaggggatctcctgatcagtgggttacaaagctctgtgggagaacagtggtttcctggggtaatacaatcacacaccccttcccttggctgggggtgggggttcccttagctctgtgtcactcctgggtgggccattgtccaatcctgctttccttcattgtctgtgggtcaagttatttccctgaacagtcccaatgtgactatctggatatttcaatttcaggtgctgtgttcactcgcccctttcattcctctttgtgagtgctgcgaactacagctgcttctaatcggccatcttctcatttctttttagatttatttttacttactttgtggtttaattttctgttgttactatactattttatattctaaattaattattgctagtttgtaagaaaaatttttgatatatattatttgttgatcttataccctaccatctttttggaacctcgttttcccccaatatttctaatataactgattttgttatattttatatgtttctatttacaaacagtagaaattttgtatatctctttttgcaatttatatatatatattttttaattttattattattatactttaagtttagggtacatgtgcacaacgtgcaggtttgttacatatgtatacatatgccatgttggtgtgctgcacccattaactcatcatttagcattaggtatatctcctaatgctatccctcccccctccccccaccccacaacaggccccggtgtgtgatgttccccttcctgtgtccatgtgttctcattgttcaattcccacctatgagtgagaacatgcggtgtttggttttttgtccttgcgataatttgctgagcatgatgattccagtttcatccatgtccctgcaaaggacatgaattcatcattttttatggctgcatagtattccatggtgtgtatgtgccacattttcttaatccagtctatcgttgttggacatttaggttggttccaagtctttgctattgtgaatagtgccgcaataaacatacatgtgcatgtgtctttatagcagcatgatttataatcctttgggtatatacccattaatgggatggctgggtcaaatggtatttctagttctagatccctgaggaatcgccacactgacttccacaatggttgaactagtttacagtcccaccaacagtgtaaaagtgttcctatttctccacatcctctccagcacctgttgtttcctgactttttaatgatcgccattctaactggtgtgagatggtatctcattgtggttttgatttgcatttctctgatggccagtgatgatgagcattttttcatgtgttttttggctgcataaatgtcttcttttgagaagtgtctgttcatatccttcgcccactttttgatggggttgtttggttttttcttgtaaatttgtttaagttctttgtagattctggatattagccctttgtcagatgagtaggttgcaaaaattttttcccattctgtaggttgcctgttcactctgatggtagtttcttttgctgtgcagaagctctttagtttaattagatcccatttgtcaattttggcttttgttgccattgcttttggtgttttagacatgaagtccttgcccatgctgtaaatgggctaaatgctccaattaaaagacacagactggcaaattggataaagagtcaagacccatcagtgtgctgtattcagtaaacccatctcacctgcagggacacacataggctcaaaataaagggatggaggaagatctaccaagcaaatggaaagccatttatatttttatatcccctttttataggggccgggagaacctatacatttttgaagagactcattgaaatttttcattgagtctttgtgacataagtttatgtctagaaaaccccataatcctggcccaaaagcttcttcagctgacaaacaacttcagcaaagtttcaagatacaaaatcaacataaaaaatccctagcattcctatatacgccaacaaaagacaagccaaaagcgaaatcagggatgcgatcccattcacaattgcctcaaaaagaataaaatacccagcaatacagctaaccagggaagtgaaagatctccacaatgagaattacaaaacactgctcaaataaatcacaaacaaatgagaaaacatcccatgctcatggtagaaagaatcaataccattaaaatagccatactgcccaaagcgttttacagattcaatgctattcatatcaaactccaatgacattcttcacagaactgtaaaacactattttaaaattcatatggaaccaaaagacaataaagctggaggcatcacgttacccaaacctcaacctgtaccacagggctgcagtaaccaaaacagcatggtactaatacaaaaatagacccatagaccaagggaatggaacagagatcccagaaataaggctgcactactacaaccatctgattttcaacaacgctaaaacaaaaacaaaccagcaatgaggaaaggacttcctattcaataaatggtgctggaataactggccagtcatatgcagaagattgaaactggaccccttttttataccatatacaaaaatcagctcaagatggattaaaggcttaaatgtaaaacccaaaactatgaaaaccctggaagacaacctaggcaataccattctggacgtcggaacaggcaaagatttcatgacaaacacaccaaaagcaatcacaatgaaagcaaaaactgacaaaaggggatcaaatgaaacttaagagcttctgcacagcaaaagaaactatcaacagagtaaacaaacaacatacagtatgggagaaaatgtttgcaagctatgcatgtgacaaaggtctaatatccagcatctataaaaactgaagcaaatttacaagaaaaaaattaaaaactggacaaagaacatgaacagacacttttcaaaagaagacatacacgcagccaacaagcttaagaaaaaaatctcaatttcaccaattattaaaaaatacaaatcaaaaccacaatgagataacatctcacaccagtcagaatagctattattaaaaggtcaaaaaataacaaatgctgatgaggttgcagagaaaaggaaatgtttatacactgttggttagagtgcaaattagttcaaccattgtgaaaaataatgtggcagttcctgcggccaaaaaacatagaaaaaaagctcatcatcactggtcatcagagaaatgcaaatcaaaaccataatggcataccatctcacaccagttagaatggtgatcattaaaaagtcaggaaacaacagatgctggagaggatgtggagaaataggaacacttttacactgttggtgggagtgtaaattagttcaaccattgtggaagacagtgtggtgattcctcaaggatttagaaccagaaatgccatttgacccagcaatcgcattactgggtacatactaaaatgtacataaatcattctactataaagacacatgcacacatatgtttattgcagcactgttcacaatagcaaagacttggaagcaacccaaatacccatcaatgatagactggattaaaaaaatgtggcacatatgcaccatggaatactatgcagccataaaaaaggataagttcctgtcctttgcagggacatggatgaagcttgaaaccatcattctcagcaaactaacacaagaacagaaaaccaaacaatgcatgttctcactcataagtgggagttgaacaatgagaacacatggacaaagggaggggaacattacacaccagggcctgtcagggggtgagggctatgggagggacagcatcaggagaaatacctaatgtagatgatgagttgatgggtgcagcaaacaaccatggcccgtgtatacctatgtaacaaacctgcacattctgcacatgtatcccagaacttaaagtataatttagaaatatatgcaaaaaacaaataatttgctgaggaaatttttatctatgtgcatcataggatttttgcattatgagtgagactgacctgtgatattccttttttgtatgttccttgtcacatttttgtattgagatcattttggtctcaaaaaataaaaaatttttaaatttttttctattttcttgaggattttgtatgagattagaacaatttcttaaattatttgtaaaattcactgaggaagacataattatagattgaatttataaatctatgtagaaaactatttagatttttgtacatcttcttgtgtaagttttggaatttatatttttcaatgagtttatccatttcctatacttttccaaatttattggcataaagtaatttctattatcattttatgatctttatgtctgtaggatatgtagtgttagactcctcatcgttcctgatactggttattggtgactactcttttttcctctttatcaatctcatcaaaaacgtatccattcttttggtcttttctaagaacaaacttgtgggtttatttatcccttctgttgcattttattttatttcattaatttctgcttattattattagttcagattcaggaggtacacgtgcaggcttgttacataggtatattgcatgatgctgaggttggggctcctagtgattccatcacccaggaaataaacataatactcaataagtggttcttcaacccttgcattcctccctccttccctgcttttggaatccacagtgtttattgctcctatcttcgtgtccatgtgaatacaatgtttagctcccacttctgggtgagaacatgcagtatttggttttctatctctgccttaatttgcttaggataatggcctccagctgcatccatgttgctgctaatgacatgatttggttattttttatggctgcatgctcttcattattttcttctattttcttagggcttaacttgccttatttttctaacgttttgaaatggatattagattaatgattttcagcattcttcttttctaaaatatatacttaaaggctataaattttactccaagtgcagctctagttgatcttatatgttttgatacttaattattcatgattattcagttacaatgttttctaatttctattagaatggctttttatggcctacaggttatttagaagcatatttcttaattttcttcttaaatatatagggattttcaaagtatctttttatcattgatatacagaataattgctctgtggtcagggaacatttttagaaatttgttgaaacttgctttaatatcccagcatatgctcaatttttattaatgtttcataaaaatagtatttacccttgaattttggggtgcagtgttctctatatgtcaggtaattcaggttttttattgtgtcatccaatattttatcatctactgatttttgcgtcagcttggtctatcagttaataagaaagttgtatgaaaatcttccacaagattgtggatttttctgctttttcttataattctgtcaattgtctctttatatgttttgaggccatatttgtaagtgcatacatatttagagttattgtatctttctgggaaatcaaaccagaaattatgaagtatttatttatgaattatatttacgaagtgtaaaaaaaaagaatgaaaaataccatttgactcagcaatctcattactgggtatatacccaaaggaatacaaatcattctaccataaagatacatgcatgcaaatgttcactgcagcactactcacaatagcaaggacagggaatcaacctaaatgcccatcaatgacaaaagaattttaagactacatattagttttgagaacaagagagcttcaagctccaagatctgagagatataaatttaagctcttaataaaacctgctgtttattaaattagtgacttacattattttttgatgttgaaccatctttgcattcctctgatataccctacttggtctgatgcttgatacactgattacacagactatggaccgggcactagtattaactcacgtaatcctcattaaccctattttatagatgctatcattctttcaaatttacaagtaagaatatcgaggcatatggaggtcaaagtgatttgccaaatattatgcagttaattcatgggctaatgaatgtaggaaatcagattccagagacttctattaaccatgactacattgctggtcttaatagctattttttacattgtatttttgcatctgtacttacagacggggttggctgagagttcctttctttttttctgtccttgtgcattctgtgttacatatttggctaatcattttagctaagtagctgtagacacaaaccatttctaaagcagagaaattatctcttctctgaagatttgatacaactcgccacaaaaccattttgttgatggagaaatggttgataatttttgacttccattttaatattttatgtgataaaataatatatttattattctaacacttctagggccaatgtaagtaattataaactttcttataatattatgtattttaactagttttctaatatattgctataaaatctactgtagatggtataattttataatgttagtactatctattttagtataatctcttttctttcctgatttgttaatttcttataccttttctattaatcattgatattgtatcagtcagctaacacaatagtaaatctccctctcagggcttacaacaataaatgttttattttctgctctgtatcttccagtttgttgagctttggctgatttcagctgagcgagcctggactcagcagcagtcacctggactccagactttcaggtgaattcatgtctgttccatatcactttccagggaaatatacttcccatgagtgggaaagaaacacaaaagccatatcaaacctgtaagcacacgtaaagctgtggctcccttcatcttagctcatggtcacatggccacaccaaacagcaaagggactggagtgtttactcctcacactctagtgggagcctttgtgaagtcctatggcaaagggcctgagatgtaattttacaacaaagaggaaacaacccaaactaccatggccatatttgctaagtttatgtctcttacaaagaaccagtattctattttattagctctatagtatttttaattctagtttattaatttaattatataattttcattcattcctttattataccctcttttgagggtataatttaattataaatataaataaataaataattataaataaattataaattataaatattaatttatctgtcatgtagggtccacactccttgtagggctatttctgaggcttgtcatttctatcagctctcactctgcttgtcccccgctgtatttggtaattgtcccatggtgaactcaaattgcctggcctccatctgagacaccactgaggtgcctgagctataggtgtggttctccactgggtttatgtttccacaatgcaggagatcatgctgctctgagacactggaaacgcagtttttcatcttggcataaatagcaaaattcagtaatagtcataagagcagcataaattcacctccgagtctatgagaggacagacctatgggtacacatccttgggggagaaactcgtcccctccagaatccaggtttctttgctcctaggtgtatttacctcctgcctgccctctgcccactcaaaaccaccctttctcgaagtctgtggcacagttaggatcctggtttaacgcaaatctgtcagtttcacattcccaccttcctgggagatctgcctatttgctgtgtgaactgaaagtcctttgtcttctgggtctatgggcccttcaatattgtgtcaatggcatcaggaaacccagccctgagagtgatcttctttacctcgagggcccctcttggtgcctggcaggcgccctgaatgggaaccaggaggaccgctggatggggcctgatgacatgagtacacagggtgaggacacttgagaaaccaaaatgtccatcacaaggcagagtcacagggaagtgacccaccccactccccacctgcgaaaaacaaacctctgaagttatttgatgacatgaagtgtttcaaagaatgagtgtgagtttggagtaaggcaagcattaaaggtcacatccgggatctgaatggcttgaccaggctctggtgacaagaactggacacttccagaaattcaggcctggatgagcacagatggtctggtgtctgctcgaggtctctgcctctctcttcatccttgtacacaatcctcctctgtgcccagccctggattgcaccctgggaacagagatgtgaactgagtacagctcctgccctagaaaagtgagatcactggtaaagggggcacagatggtagctcccgtcagagagaagagggctgatttgaggacacgctgctggaggattcatttgttccataaatgtttattgagcattgactctgtttccaggcactcttctcggtggagaaacaaaagctagagaacaagacccctgttctcatgagcttctcgttctacagggatggggggtggttgatggtcaatcaatatggaaccaaataagcaaagatacagggagatgtctggagagagggagcagcaggtgccaacatccacattcagctttggattgaagtcagctgcaaataccccttccccttgtgcctggccctgtgaggtgcccaaagaagacatttgacaaacattctaaatgagaaaagaggaaggaggtgactcagtgctaggggtatttagtctctccaccccagtcctgcaataaacaaaacacaaatggaagtagtccgatcaactgatacaaagatgtgtacacatgtgcgtgtttgtgtgcgtgtgtttgtatgtgtgtgtgtgtgtgtgtgtgtgcatgcgtttgtctggtggaaaatctatgcattcttctgaaaataaatatctgaagaaaactacccctgggaacctgtgactctggaagctcagaggcgctgagtcatagagatggatgcctgagagggggtagtagaggagggggttagggcactaatgtagagagccacccagtgctgtgctggagaccctgccagcagccctggagagctgcccaggacacagtagttctaaggatggttgattattaatctggggttgaaggccaatccagtgctgtccctggtcatcacactgattggattggacatcgctgaggcacctgccagaggcctaggctggagagccagcttccctgtcactaactccaggctctgaagaagccctagtaagtcatttctggaggaaagaggtgggggcctgggccaagagactggcctcttgactggatcctggtgaggtccaggtaggggtttaggggggtcatcaggtccacctggggcctctctttctttctggcccaagcaactgggaacttcctgtatctacttggccatcagcaaactaaagtgtggtctttgccaaagtgaagaatagaagtggcatgtgcacgctagcgacaggtacaagccttgactgtggcatccaatgccaattcagcgccaacaggagaggtttaaaagagacaaaaatgatagaaagaggaaagttggagaaggacatgaccataaaagtttccttccaactgggcatctctcactgcatcttggaggaaggaaagagttaagggactgcggctgggatagcaagggcagacacagtgttggacggcaagagccgggacattaggattcgaggatggagcagagcagagggagagtcctgtggggtcccagctgccaagtgtcctggaggacaggccagcctggacaaaagctggaagggactctgatagctgggtaggggcacagagctggggggcatctgggcagtctccaggagggggagtaggagctgaatccctccagactcaggctgagcagaaatttcagagcctggttggtgaaacggcctctcagtggaagatctcaaaccaagagaagtctcatctggacaggatcaatcaccaaaaaaggtcccattttgagggtcagaatcctgcctcagggcactctaggtcccaatcctacagcaagtgcctgtcacaaaatagacattatgcaagatggtcaagaagcagctggggaaacaagggctgctctgaggacagagccccaccatgtcaatcagggagctttataggaaatgagagagtggatatcatcaaccaaaggggacatgtgccatctacctgggctcaatgggggtttcccaatggattctttgtaaataggtgttgcacatatctgttttttttttaagctttcctttataacttccagacctacttctgatggtgatgaatttctttcaaaacctaaccctagatatggggtcagctttaggcaaaattaagagttgctagctaacaaaagtagctaatattttaatgaaatgtcttattaataagcaaaatgccctcacactgttaaacttgtgcttctctcacctcttccttctgtctctctttttaataccttgatgcagcagcaatggatggtgggttgctctcaaggcagtcagagttccacttgagttcatgtagcatctgttataacaaggttaaaattacagaaagtatacgattttattccctttagctgaaggacaacaaaggtggattttcatgtttccttgtaaagtgctgcttcagagaaagcacattttggtatccactaatcccaagtaaagtgacttggttcctaatgttgattttgccattagcctttgttaggttatttattctttaagcccatcaacccttcagttagtcttcattctgcctatttgttgttgaaatttaaaaggcctcctagtagctccaatagttatagtataatagaaacaagcaaatactcctttaaaaaaattctatgagggtaaaaacacttggattcaaaagtgagtttgaacaatatctaccaagtggtaattagatagacttttaaactaaaaatacaccacaagactattgcacacttctactaaggtctcaaggattattgaaaagtaaaaagaaaaaaatagtgggaacttcttttagttaaaatgcacatcttatcaggattaccataataatagtaattgtaacctttagtttgaatttcttttctggaaatataaagtcttagggaattgtgatataaatcccaaggctaaaataggtgtccacttatcattctaatttttatttgataatagtcttcctaaatagactattataaaatggaaggagcaagttggaaaacttaactctgaagagcgggcatttctaattaggaagctgtaggagaaaaggcttatgactatccaaagcacttaggcatctgatatattatatggaatgtctttctcttttcccttagttatcaaagagagaacaagttgaatggtattaaaacaagaaaaaatagtcttagttggattaaataggacttcaaggggctctctgacagatacactcatgaaattatgacataactctgcaaacttaatatgtgaaataaaaaacatgtagaagacacaagattctaaggggaactcaaggattttctaagattgttttacataactgcctcttttttccaaactttaccttctgtatcaacaagccatgatataacagcatcaagggctagacagtccaatggcaagaatgctgacaaaggtagttgtataagaatgagtcgccgggtgtggtggctcatgcctgtaatcccagcactttgggaggccgaggtgggtggatctcgaagtcaggagatcgagaccatcctggctaacatggtgaaaccccgtctctattaaaaatacaaaaaaaaaaaaaaattagccaggcatcgtggaggacatctgtagtcccagctactcgggaggctgaggcgggagaatggcgtgaacccgggaggcggaggttgcagtgagctgagattgtgcactgcactctagcctgggtgactgagcaagactccatctcaaaaaaaaaaaaaaaaaaaaaagaatgagtcatattttgaaggacaaatggttaataccttctttcttgcttttttatattggcatttttttctatgttttggaggaattgaggattagaaggttatttatgagagtatgacttgtaagagtataggcaaatttaactcaattcattaaatagttattgaatctgcaaaacattatggaggatatagaaaattgttacagtatgaatcttatcctcaaggagcataatcttctcccaatatgaagtttaagagactaccaaaaaacaatcttcttgttagaacagattataatggattttgctcctaaatccaatgtaataatgacacatttagaaactgagataaaaatgtgaaataagacttagaacttatttgatataaaatttactgggtaaatctattgatagcagatattatgtagaatttaaatacccctacctcaactggaaagtaataaggtctcattattatcttatactcatgcaatccagtgcgttttcagttaacccttgaacaacacagtggttagggtgctgacctctatgaagtcaaaaatcactgtatcacttttgactttaactgctggtaatataataatagcctaccgttgatcagaagcctttccaataacataaacaattaattaacatatgtcatgcatgttatatgtattatacactgcattctcacaataaagtaagtgagagaaaatgttattaagagaattataggatcttcactattcactgagcggaaatggatcatcataaaggtcttcatcctcatcatcttcatgttgagtaggctgaggcacaagaagaggagggattgatcttgctgtctcagggatggcagaggcagaagaaaatctatgtatctgtgaacccatgcagttcaaacctatattgttcaaaggtaaactgtatatggaaattatagagggggaatacaattaaattaactaacttaatatttaagtaaataatttagagactcaaaaccaagaagagggcaatatacaaatctacacaaatgaattgtttagagtgtggggtgtgtgtgtgtgtgtgtgtatgtgtgtgtccgtgtgtgacagagaggaagaaagaaagagattacatgaaaatggaaatgtggatcttttcatagtaatagaggggtgaaaatgtccaaaaataaatttgctaactcttgagtaaactgaaatgcacatatgaaagctttgtaattcatccatgaacttataagcacacatatacatacactcccccacacacaccacacacacatttatgcacttgtagagatgtagataaataggcagatagatatagaccacttctgtagtagttaaaatcattaccaatagtaaaatatgaaaaaattgtatggtgagaataagaagatatttaattaaattaattattattagaaatatatagagagaagcagtaatgagagcttgtaactaccagaataaaagttgcttcagtttctaaattttcaaatcccaaaccctatgtttcccagaaggctaacccttgagtgcgaaaaagtgtcatcttagaaatgacataccatcactactggcatattctactggtcatatagatgaaccgtggtacactgaggggggaaactacaccagtgcatgaataccaggaggtaatgtccattggggtccttcttagaggccagttactgtagactgctctctggctccaagtaatgcacacacctcactaattgtatcctaagtctaccaaagcttcatctcatcacagcattagtttgaagtctagaatcttgtcgtttaaatcaggtctcgctgcaaatacaactccttgagtacagtttgtcttgatttgaagtcctttgaaactaaagaaacaacttacctatctttcacacatccatcataaaatgatgagacaggcatagaataatcatcataggcactctgacttaatagaagaaaaaaggagacatacagaagtcagcagtcaatgagagttctgaaatctagctgggaaaatgttaattttttctttttttttttttgatgaggatttaatcctactcctacccattaatggctatttcttgattccactgtctggcctcagttctatccttcaaaatagccctcctttttcataaaagttagaacatatttaagtcgagtactttactcagcctgctatctgcttaaagaaatttgggtagcccactttaaaataactctggcttattcagtttaaattatcaatatttttacatatgtaatttaccttcaaatttttgtagatttactgtgaatcttactgagattcactcatacacaaagggtaactcagtaaccttttcagaaatatgctcttctcattcttgaacttttgttgaggaggctgtagagcaatgctgcgagcttcctgcaggttctattgttcgattgagttatctgtatatcatatactttatattttagaggaccgtttgtctagctaaatggcattccaaagcacaacctttgatctttctgcaacatatggaaaattttacagttatctttttggctacaattttggaccatactttcctggcagtgccctggattctatctttgcttgaaagccatttattgatttcagcatcatttgccatctggtgaatctcagaattttcaaagccattacatccattatttttaagttaatattatttatttattcataaaaacaaagggaacatatatgcaaaaatagaaccttttgaactctacagaatgttttaatcaaaactaggttaacaagtaattattgaacatcacttttatgttatgcaatctattctgtgatgtaaaaagagatacaaagtacttactcccatagtgattgcattatatttgctgtagacaaatattaagtaaattcatattttttggattttagcaagtacattgaacaaacaaatcgggggcaatatgagtattgactggtagtctctgtttcagctaagatagtcagggaatggacatgatgactgtgttagtcaaggtatctagaggaacagaaaaaatatgtatatatacacatccatgtatattcaaagtaggcagccctcatccactcaaggactttgcttcctcttttagggaaggggttagtgcatttttggttgccacaggatagttgtatcacatcaggcagaactatgaccttgctattttctttaattgacaattaagtatggttttaggagatacatggctgccacgttgacaggggatgaacttgtaatagctaattttatgtgttgatttgactaggctatgagtacccagatatgctgacaaatgttattaagtgtatctgcaaggatgttctagataagattaatatttaaattcatggagtgaggaaagcagattgttctctagtgtaggtagcccttatccaatcaattgaagaggtgaatagcacaaataaagttgattaagagaggactccttttcaatgtttcaaatagaaacattgtcttttcttgcgtatcgagcctgccagcttttggactgaatcttactctaccagctctcctggttctcatgcctttggactcaaactggaactacatttcatctctcctgtgtctccagcttgccaactgcagatattgagacttctcagcctctataaggatggtgtgagccaatttcttatcatttctctctcatcatatgtgcctctagataacgttgactaatagagtcatcatgtccattccatgactatcttagctgtatatactgctctcaatattgaaagatagagagagagagagagagagagagagagagattacaagaaattggctcacattatggaggctgataagtctcaatatctgcagttggcaagctggagacacagaaaagctgaagtttagttctagtttgagtccaaaggcatgagaaccaggagacctgatagtgtaagcttcagtccaaaagctggcaagctcagtacctgagaaaatccatgtttccatttgaatttaaaagcaagaaaagaccaatggcccagctcaggtagccaggcaagaggagtcctcccttaatcaacatttttgtgctattcaggtcttcaattgaccggataaggcctacctactttagagagaacaatctgctttattcactctatgaatttaaatatcaatctcatctagaacatccttgcagatacacttaataacatttgtcagcatatctgggtactcatagcctagtcaaatcaacacataaaattagctattataagttcatcccctgtcaacgtggcagccatgtatctcctaaaaccatacttaattgtcaattaaagaaaatagcaaggtcataattctgcctgacaggatacaactattctgtatacaaccaaaagttgcactaatcccttcccagaaagaggaagcaaagtccttgagtaatgtttactcttcttgttatctcctaacttaaatactatgatgtaaaattagcattacttaaatactaggaaacaaagtcagtacatctcatattatatgataaagtcatgaaaacaggaagcaaccgtcttgctactgagtcactacaggtaggtaatagtgaactctgtcactctcatttacactccttcattcctggagccatgaattctactatggtaaaaacagcaccatatattgaatgctgattcagagcatatgcagccttctggagattttttcccagttctgcaagatattgccacctagctggtgctgcagcagagtttttaatacgctattccaccattctatcaatccaattgcttcagggtcatgggcaatatggtaagactattggatcataagcatgggcccattgctgacatctattgctaggaagtgacttatttgattacacgcaatggtgtgtggtacactgtgatagtgtataagacattcgtaagtctcttatggtagtttgggaagaagcactgcatgcagggaaggcaatccatattcaaagtaagtgtctattcctataagaacaaaatgctgctacttccatgatgaaattcatcccatgtaatcagcctgcccccaggcagccagccaattactccagggaatgtcaccatatcaggggctcaatgttgtcctctgctactagtagactgaggaatcaagtcaggcttggtgagtggaagttcatattgttcactatgttttaacacaggcacaccagctgctgcagctgggacaggaagctccaggtgccagcgtgagtgctagctcactataaggctttggctagaccagacacaccacaagcagcttccacagctgttacaagggaacacagttgtacctggaagcttgcagactccaggaaccatagggtccaatagcgggagtcacagctctggcctcgggagctcccaggtctgggttcccatagagccacagctctttttttcttctctcttcttgtcatccacaacatggtgagcaaggggtgtgtttcacccttgtttgtgttacagcatttttaaccctgtcatttggcaggtcccaagttcttgtcttacctccaggaataatgaggtatacagacaagttgagggtgagcaaagagaagctatattgagtgacagaacaactcagaggatgtcctggagtgggcacctccattctgcagctgggcatcccaacatctgcatctctcagaagagatgaggccctggagttggtagctcctctctgcagctggtcgtcccaatgtctgctcagttctggctgagcctggggcttttatgggtctcagaaaggaagaaatgcacactgattggtccatgagaggccatgggtggccccagaaaaggcatcacaagtttacactctggttcacgggactggcagcccagaccccagccttcacacccatcctggcctgaaggtagggcctcaccaaggacccacccccttctgtgcaggagcccgtctgcctcctgctgccattcatggcacccaggctatttgtgccaaaggatgcctgcaggccagtgtcaagctgccctcagcatctcctcagcttccctcccatgcttgtcagtgcccaaagcctgggcagaggccagaggcaggatggtactggtgtatcagcactgcctcaagcatgcgcacacctaccaggctgcaacagcacctgggcctacccacaaccttgctccaagatcagagcaggtgtcaagagtggtgaggagccaggcaacgggagcagaagatacctccaagtctgtaagggcctgggtttttttcctgtgcccccaagagtgtagagatgcctgactctgcagccatggcttgggcatctgtagttgcaccttgaaggacaggtctcctgcctgctccatggaatgggaggcccaggtctgcagccactacttgggctgctgcacctgttcccaggaagctccagctccaccaactcaggaggggcatgtttcccacttgtccccagctccttgccatgtttcaccgctgtagctgatgtgacagcagtggctgctccagatggggtgccgctgccatcattatagcagtagattattagactacagtgtatttttaccaggtaaggtaaggtttttatggttcgctgaggacagtcaatcccttcataaactagaacctgaagactgatcttctgagaacatcaaagaaagactgtcattggcatccacactacagcaaaacttcaggaccttgaaccttgggttcctaatctcacaactgaaaaggctccctttacactcttggaactgtacacccattagaagccttaaagaaaagctaaccagggaggtttctccccagaagaagatggcatccttgatgtgaacaggttttcccaagatcacggatcaagagttctctactatcatgagactcttatctttgattatttgtcccttgcttatgcttctatgaataatagaggtgaaagggttctcttgtgtgcacttatggggtatacttttatttgtgaaggattttgcagccagccttatacatggataaccttacaacttaatagacaaaaatgaaggcccaatgtagatgagaaactttaatggtacgtacattgcctcataatcagtcagaaacagaacattgatttactccttttagtccacatcatgggctaaggagaacattgctgggaggatttcactcttctaaaagggcatcatttgttaggtccttattccatagtttggaataaaaatgtcaatgattaaaaatgtatccctcatgataggctctaaagcagattctactgtaaaggctatggttacacacaaactttaaattctcttgtgaaagttatgctaaataatagaattgatctggattagttactggctaaacagaagtctctgtacagatgttggcacttatggcctatggagaaaacgtcacgtattatagagatttagttgtaggggattaatgaagatactccttagttaagtgagtagactcttcatatagctcattctttgatctatttaattttaggtggtttggtttatgtggaccccgggtaaggagcatactccaaactcttggtattatcctactgatagtcataataatagtctttctggtgtgctatattctcttagaagttttaagtgtttgcatgcagccatctctagaatgtcaaatggtctctctttaactggaatgacaagagctgaaagaaatatgcagccatgaggacaccgtgacttatgaatgacatgctgagaccagaaacccaaaatgatggtaactgagagtggtgctaaggccctaagtttgttcacactctcacctaagtgagaacatgacctaaaaaaaagggggattcttttaaacgaaattatgggaggccattgttttggactgagctaggccccaatagaccaaaccaaacaaaactcgggttgcttgtgctaaatgtaacataatcaaactacgtttgatcatggaaaacatacaaacacataggttctacaacagaccaggttttgtttttcttctgtaaacagaatgttccagcatatggatacaccctctactcagtccttgttcacatctttgccaaactcactgttctgctctttcccagtaagtttcaagagccatggtaatagtaacatcagtaactaaagttttggtcaatatctcaagattgagaaaatgacccaaagagggaaattgttaaatcaagtttagccctaaagctgcctccttacatattaaagttcaacctaaaggtttttctgtacatcgtgaactataacaagtggagttgtaaaccaactgtagcccacacctgtaccaatcactgagttttggccaaatgtagctaacagttccaaccatgttcaaataaggcaaaggcccagctgcaactaatccagttgtttctgtacctcactttccttttgctgtccataaatcttcttccaccacgtggctgcgctacagtctctctaaatctgctgtaattctgggcgctacctgattctcccatcattcattgctcatactactttaaatttaatttggttgaaatttttctcttaatgacaatcatagaatcagtgtaacaatctgtcttcaaaagtagtaaagtgtgttacttctatgggagaaaacaagacatctgtaatgataagccagaatggtcactgcaaacagcaagatgtatatttaactcagcctattcttggtgtaaaatatatatatataaaatttaatgtagtttgagcaatgaacgatgggagaatcaggcagcgcccagaattacagcagatttagagagactgtagcgcagccacgtggtggaagaagattaatggacagcaaaaggaaagtgaggtacagaaacaactggattagttgcagctgggcctttgccttatttgaacatggttggaactgttagctacatttttatatatatattatatataatatattatttataatatatataatatattatatatattatatataatatattatatataatatatataatttatgtattatatataatatatataatttatgtattatataatatataatatataatttatgtattatataatatataatatataatttatgtattatataatatataatatataatttatgtattatatattatatataattcataaattatgtataatatataatataatttatatattatataatacatctatatttttatatattttatatttatatatatttaacattatatatatttatatatatctatatattatatatatttatatatattatatatacatatataatatatttatatataatatatattatatatattttatatatgtatatatagtatattatatatagtatatatttatatattatatataattatatattatatatttatatataatatatttatatattatatataattatatattatatatttatatattatatataattatatattatatatttatatattatataattatatattatatatttatatataatatataattatatattatatatttatatattatatataattatatattatatatttatatattatatataattacatattatatatttatatattatatataattatatataatatatttatatattatatataattatatattatacatttatatattatattaatatattataatatatattatatattatattaatatattataatatattatatattatattaatatattataatatattatatattatatatatatttatatatatttatatataattatatattatatattatatatttatattatatatatattatatatattatatatttatatatttatatatattataaatatatatataatataatatatttatattatatataatatattatataatatattacatataatatataatatattatatataattatatattgtatctttatatgtcatatatatttatgatatatatttatatgtcatatatatttttatatatatggaaaacacattttaactaggttctgcactctctcctttatcacttttttacttagctcagatttagaacaacgtgaatagttcatgagctcaaatgttctcccaagttcagttaataacaccagcttgaggttgctgtacacacttaataaaatgtgctaatatttaataaaactaatattattaataattacctcatagactctccactctttccctttttcacaataagcaaatctcctctttttataaggctcagattggagggtttatgccatatttattttaatacactgactttgtgaagatatcctgagagttctagaattttttacatcaacattttcagattgatttatcatgaatgttattccctgtgcatctctttttcatttgtaactgtttatgaggacttgttatgcaccagatattttgctagcaactttataagcagtatcccatgtaatcctcaaaatactctatgaggaatttttgttatttattctcctttacaggcaagggaatctaaatctcagggaagttcattacctgttccaatgttacagaggagaaaggtgatggaactgggattttagttccatccaggcaatcctacatcagctctcacttttaatctcttcccaactttgtctctctctatttcttttcagatgataatgatttcataagtatgattgattttgcctgactaagccaaactatattagcacgttattaggttagaataacttaatccctttacttggagaaaaaaaaacaaatcaattaaacaactgcattgatgagacagaggaactgttttaggcataatgtagtctagaagtttttcaagtgtgatcaacagaccaacagcatccacatcatacacaaatgtattagaaatgcaaattcttgggtaccattccagcatgaatgaatcagaaactaaggaaacagcaatctgtcttttaacacgtcttttaagtgaattttagattccaaaatatattaaccactgccataatcaaggggtcaataaattaatgaacatgagtcaagcttaggcacctcttatttgtttgctttttaaaattttaatatgatatacatacatcattaaaaaattttaagtgtataattctatggtagtaattacatgcaaaatgtataaacatcagaactatctatttctaaaattagctcatcactccaaacaaaaactatactcataaaacggtaacaccttttaactctcccctcacatcctagtaatcactaacatgttttctatctctatgaattttcccattctagatatttcatatgtttggaatcatacaatatttgtccttttgagtctggcttatttcacttagaaaatgtttttaaggttcattatgctgtagtgtgtatcaaaacatcattcttttttatggctgaataataatcctttgtatttatgtacaacattttgttcatctattcattgattaaagattcatctgttaggctttttctaccttttgactattgtaaaaaatgctgcaaaaaaaaccactggtgtacaagtatctgtttgagtcacgcttaaattatttcgggtatatacctagaagtggaattattctatgtttagctttttgattaacctccaaattgatttccacagtaagtgcacaatttgatatttccaccaccaatgtaagtgtctttaactttatccacatcttggctaaccctttttcctccccctactctctctctctctctctctatatatatattttttaatgtatttatgtatttattttttattacagtcatcctaatagttgcgaagaaggccatgagtgctggctcatacctgtaatagcagtactttagaaggctgaggtgggctgatcacctgaggtcagaagttcgagaccagcctggccaacacaatgaaaccctgtctctactaaaaatctggaaaaaaaaaaaaaaaaaaaaaaattagccgggcgttgtggtatgtgcctgtagccccagctagtccggaggctgaggcaggagaattgcttgaacctgggaggaggaggctgcagtgaggtgagattgtgccactgcactccaacctggttgacagagtgagactctgtctcaaaaaaaatatcgttgcgaagtagtgtaataatatctcactgtgattttgatttttatttcctgaatgactaatgatgttaactctctttttatgtacttgttggctatttgtacattttctttgaaaatgtatataccagttctttgcccatttttaaaataggttctttagtttaattaattcttaataatttatctttatattgcatttgcttttaggttcttggtcatgaaatccttgcttaagccaatgtctagaagggtttttccaatgttatcgtctagaatttttatggtctcaggtcttagatttaaatctttaatccatcttgagctgatttttgtataaggtgagagatgagcatccagtttcattctcctacatgtggctagccaattatcccagcatcatttgttgaaaagggtgtcctttccccactttatgtttttgtttactttgttgaagatcaattggctctaagtatttggatttatttctgggttttctattctgttccattggtttatgtgcctatttttataccagagcttttgcactgcaaaaggaacagtcagcagagtaaatagacacctgaagagtgggaaaaaatattcacactctatacatctgagaaaggactaatatccagaatctacaatgaactcaaacaaatcaacaaggaaaaaacaaacaatcccatcaaaaagtggactaaggacatgaatagacaattctcaaaagaagatatacaaatggccaacaaacatatgaaaaaatgctcaacatcactaatgatcaaggatgagtgcaccaaatctcacaaatcaccactaaagaacttactcatgtaaccaaacaccacctgttccccaataaactatggaaatttaaaaaatagcttctttgtcttctgttattgagttttaaagattctttatatattttggatattaaatccttatgagatatatgatttgcaaattttttccattctgtaagctatctctcactttcttcataatgtcctttaatgaaccgatgtttttaattttgataaagttcaacttatctagttttttgttgctgtggtatttttggtgtcatatttaaaaatccattgccaaatcccagttcatatttatccctaagagtatcacggttttggctctcatatttgagtcatcgattcattttgaataaatttttgtatatagtatgagtaaattttttacatatggtgtgagttaatttttgtatatgggatgaagcctaaccttaatttgtctttggaaattcagttgtcctaacatcatttgttgaatatttttcttgacttggcaggcttgttaaaaataaattttccataaatatatggtttatgtctggattcaattctattccatttatctatacacctatcctacgccatttccatgctgttttaattactgtaggtttttgataagttttgaaatggtagagtttgagtcctccaactttatctttgttttttaggatttccatgtacaattctggaatttgagaattggtatttctgtttcagtaaaatgactattggaattttactaaatattgtattgaatctttagacagctttggtagttctgctattttagcactattaatttgtcttcaaatccatcaacatagggttgctttcaatttgtttaggacttctttaatttctttcggtgatgctttgctcttttcagtgtacaagtgttcacatttttcattaaatttattcttaggtgttttgatcttttagatactatcataaatggaatttgtttcctaattttgtttttggattatttatttctagcatatagagacatgaatgaatcttgtgtgttgaccttgtaatatgcagttttgctgaattttttattagctctactagctttctgatggattttttttcagatttttttatatgtagaattatgtaatctgaaaagagaaataatttattcctttccagtttggatgcctcttatttgtctttcttgctaattgctctgctagaagttgcaatgttcactagtgattaaagcagacatccttgtcttgttcctgatgttaaagaaaagtgttcagtcttttgccattgaatatgttgttagctgcgggtatttttaaaatgtcctttattaggttaaggaaattcccttctttatgctcagtgacttttaccatgaaggtgtgttgaattttgtcaaatgctatttctgtgtcaatgaattgatctcctttttttcttcttcttcttctttgctgtattacatcggtaatttcaatgtgctgctttacattgattggttttcttacattgaactacccttacatttataagataaattcttcttggtcatagggcataatcctgtttaggaatttggtttcctagtatttggtaaagagttttgcatttatatgtgtaaagaatattcacctgtaattgtctttacttgtggtctcttcatctgtacttacactaggagaaatgcttgcctcatagaatgaattaatcagtaatatctccatttctgtttttgggaaagtttgccatgcaatttttgccagttcgtctctaaatgtatcctataagttactattaaaaccatctggtattcgcggtagctcacgcctgtaatcccagcacgttgggaggccaaggcgggcggatcacgaggtcaggaaatcgagaccatcctggctaacacggtgaaaccccgtctgtactaaaaataaaaaaaattagccgggcgacgtggcgggcgtctgtagtcccagctactggggaggctgaggcaggagaatgacttgaacccgggtggcggagcttgcagtgagccgaaattgcgccactgcacttcagcctgggcgacagagcgagactccgtctcaaaaaaaaaataaaaataaaaaaccatgtggtaggtattataattttcttgattgggtggtttttttttttttttttttttttactacaacttgtatttctttacctattattgctctgttgacatatatattttatttcttcttgagtgagcttaggtaatttgtgtgtttctagaaaattcaacaatttcatctaggttatctagtttatggcttaatttggtcatattattctcataatcatttttatttctataagatcagtagtaatagccccagttttatttctgatttcaattatttattatctcttttcttctttatcagtatagagtaatttgtcaattttgccgattttttaatagaatcagcttttggttttattatttctttctctataattcctgccctgtattttatttacttccattttaattattattatttcctctcttctacttgtgtttaatttgctcttattttctggttcataaaagtctgaagttatgttattgatttgagatcttttgtacattttttaatgtaggctattgcaactataaattttcatctgagcactgattttgcttcatctcataagtttagtatgttgtgttgttattgcatatcttcagatatttgtaatttctcttctttgatccattgcttgaaaaggcactcatggtttaattgccatatatttgtatattttccagtttttctcctgttgttgatttaaagttccactccattgtgttccgagaagatgctttgtataagttaaatgtttttaaaatgtattgaagaattctttgttgcctaacacatgggctatcagagagaacatgtattctgctgttgttgggtggaatgtcctgtgtatgtctattaggtatagttgatttatataaacactatactttaattcctctatttccttgttgcagattttctatcaagaatttgaagtggcccattgatgtctccaactattattgcagaactacgtattctctccctaaattttgccaatatttgcttcgtatattttggggggccctgttgtttagtgtgtgcatatttataattgttatatcttcttgataaattgatccttttattagtgtttaatgcccttgttccaattgtaacagtggttaaattaaagtcaattcatgtcatactagtagagccacaccacctctcttttggttaccatttgtatggaatacatttttctgtttttcactttcaatttatttgtggcttgcaactaaattgagtctcttataaaaaatatgtagttgtgtgatttttaaaatccattacactgacttttgcctctcaattggaaagtttacttcatttacttttatagaaattattgatgagaattactactgccattttgctttttgttttctatatggcttacaattttttgttcatttcttcccttaatagtttttttgtgattagttgatttttatagtaaaatgttttaaaaacctctgtcattttcttatgtgtgcattttaaaaatattgtctctaactgccataaggattctgtttaatatcttaaatttataatcctctatgttttaattaatgccaacataatttcaatagcatgaaacactccatatctgtgcagtccccttacccatttcatgttgtttcacaaattacattcatatacattctgtgctgaataacataaatttataattatttttataaattttttcaacatgtatagaaaataaaaatggagttataaactaaaaataaaataatgctaagttttataattgcccatggacttactttttccaggaaacctttatttcttcattcatctttaggttattgtctagtgtcttttcatttcaacctgaaagaatctctttagcatttttcataggacacgtctgtaggttataaactctgtcatcttttgtttctctgtaaatgtcttaattctttactcatttatcatagaatgttttgctagataaagaattctcagtaagcagttgttactgtttttggtctttctttcaggactaaaacatatttgtccactatcttctcactaccatcatttataatgagaaaatagctcttaatcttattgagaatcccttgtacataataaatcgattttccctagctacttgcaaaattgtctgtttgtctttagctttcaataatttgacaactgtatatctggagaaaccccgtatatatggagaaaccccgtctctactaaaaacacaaaaaattagccaggcgcagtggtgcatgcctgtaatcccagctactcgggaggctgaggtaggagaatcacttgaacttgggaggcggaggttgcggtgagccaagatcgtgccagcctgggcaacaatagcaaaactctgtatcacaaaacaaaaaacaaaaaacaaaaaaaaaaaacactaaataattcatttagtatgggagagtgtgaggaaacagaaaattaaaaaaaaaaatagatcagcaataatgtcactttttcatgaatttgttagttctttctgagctccacttacagttactttcccattcttccctgcacaccgtcaacacataaggactcaaattaagatgatgtatatgtttacactccaaaatttttaaagaaaaaggagagagagaaaaaaaagtaaaagaaaagaaacccaaaagggaaaatagctaaggtgaactggtgagtttctactcagatttcttattattgagtatgatgtattttgttttcttaacttatgtataatgaaaatggaagagaagaattataaatcatagttcatttttatgattagtacataaataaaatttgagtctttcttggcatccattactttatcttaaaaacacagagtatttactttttgtgtggcaaaggaggcctaatggggaaccttgaccttcatctcaacttgacagtaaaacggtgctccttccttccccttttgcttgccatgtgtctgaaaaagactagtagcaagaatatataaagaactttcaaaacttaagagtgaacaaagtcaaattagaaagtgggcaaaagacatgaatatacatttcactgaaaagaatatatgtttggaaaatcagagcatgaaaagatgtcaacatcattagccattagggaatgaaaaattagaaccccaatgggatttcaatatatgcccaatggaatagttacaataaaaaataatgacaacattgagtgctagcaaggctgcaaagaaactacataactgctgcatggttgatgggaatgtaaaataacaaagccattctctgtaacaatttggtactttctttaaaaagcaaacaaacagtttaacaggcaatgactttatgactcagtgatttcactcctgggtatttacagcagagtaatttttaaaaaccacgttaattcaaaaactttacacaaatattcagaacagctttatttttaataaccccaaactggaaacgacccagacatttttgaaggagtgaataagtttaaacaaaatgtattacattcatgcaatgaagcactacttagcaacaaaaagaagcaagttattgatatagacaacaacttccatacattttcagagaattatgctgagtaaataaatctgaccacaaaagattatatgatgtagaatttcccttgtagaacattactgaagtgacaaaattatgagaatggaggaaagattaatggttatcaagggttaaagatgaggtgaaaaagaggaaaatagatgtggctaggaaagaacaacatgagggattccatggtaatggaaatattctgtatgttgactatatcaatctccacatattggttatgatattgtactatacttttgcaagatgttaccactgggagaactgagataaggttacaagaaatctctctatattatttcttataactgtaagtaaatctacaattatatcaaaatttaaaggttattttaaaaagagagttcttaaattaataattcattctcccaaccttagaaattagaaaaggaagactaaactgagcacaaagcaagaaaaacaaagaaataatacagattagagcagaaatcaatcaaatagaaaataaaacaaaaaacaataaagaaatttaaagatccaaagtttgaatctttgaaaagataaacaaaattgagaaatacttagatgatgaataataaaaaaggccgggcatggtggcttacgcctgtaatcccaatactttgggaggccgaggcaggtggatcacttgaggccaggagttcgtgactagcctggccaacgtggtgaaaccccatctctactaaaaatacaaaaattagccaggcatggtggcgggtgcttgtaatcccagctactcaggaggctgaggcagaattacttgaacccaggaggcagaggttacagtgaacccacatcctgccattgcactccagcctaggcgacagcagcaaaactctgtctcaaaaaagaaaaaaaaaaaagaaagaaaaaaaaataatgtgttgattaccaaaatcaagaacaaaggttactactaccaatcctcccccatctcatccaaatatatgaattataagggaaatactatgaaacactttgtgaccacaaattatacaacttatatttaaggtagaaagtcttaaaaatatataaattaccacagctgaaataaaaatgaatagaaaatctgaataaacatgtcaaattagcaattaaaagtctttcataaggaaatatacaggaccacatgacttcactggtaagttatttcgcatattcaatgaagaaatgatacacatactcagaaaatagaaaaagagagaaacttcccaattcatgttataaggcctatattcaaaagcaaaaatgaaaaaagaaagaaagaaaaagaaatttttaaaaacaaaaaaataaaaattaaattacagatcaatatacctcacagatatagacacaaaaatctccaataaaatattatcaaactaaattcaaccatatataaaaatgattgcactccatgactaagtgaaattaatcccagaaatgcaagactgtttttgtattttaaatacaaaatgtaatgtaatatactatgttataaaatgaactaaaatgaaatgattatctcaatgatgcaggaaaaggatttgacagaatctaatgtgaattaataaaaaaaatagaatggaaattcttcaacctgatagaggacatcaacaacaacaacaaccaaaaacactacattttacagcatagctaatggtgaaagactggatatttgcccctcaaaattggcgacgtgccaaagatgtctataaagtttactctccctaattctatccaatattgcactggaagttatagtcaatacaatgaagaatacatcaataaagccatcaggaaatggaagtggctgggctcaatagctcaggcctgtaatcccagtgccttgggaggccaagtcaggagacttacttgaggctaggagtttagaaccagcctgggcaacaaagacagatcctcttctctatgaatttatttattttttttaaattagccaggcatggtggtattcacccctcagtcctaggtactcaggacgttgaggcaggaagatcacttgagccaggagttcaaggttgcagtgaactatgattgcaagctactacactccagcctggtagatagagaaagacactctatctcttaaaaaaattaagaaaataattatattcacaatactatacaaataaacccttggaaatacatttagcaaaatatgtgtaagaattgtatgctgaaaactaataatctaagcaaatggaaaatcattccatgctcatggattgggagacctactattgtttttctagtaattctcccatcatagatctatagatttaatactattgttaccatacattagccatattatatgaacataaatatttcatttgtgagcctcatatctaattatttgttatttacatataattattttaatattagctctttgaaaagcactttaaaaatggttccctgagaccttggctttcaagttctaattaaactattcaatatgaactagaaaatttagtaaacaaagtgtcatcttccgcctcgttatctttttatttggaaaactatgttagactccaaggtattctctccttacttcaatgtagcagaagtaaccagtttaattgttcagaacctgacatttatttaatcatgtctttttagtgttcaggtttattgtcttcaatgactggatgccaatctgcttcctttttgactttcctaggctcggattcatcagattctctacttgagtcatttgcaatggaaagaccctcccacagggtagaggttattcattctctatctctctctctctccaccacaatttttgccaagagcaagtcaggtttttggtcaagctaggtttttactgcatgctttccttcaactaagtgtgaaagaaatctattaaataatatttaatttggtctcaaatgtgaaccatactctccaacctagtatttctaccaaataaccatgaactgaaatttacttcatagttttgaccttcataaattgtttgtttccccatttatctccaattcttatatgtttttaaattattgatatcaactctggagaaaagaataagtcttacacccggcataacaacaggtacaattaaagaagtatgttccttaacatgagaagaatgttaacccgtttcaatcacaagtatttgatttttccatgagtaacactatgctatgcattgtggagtttacagaagagttgagatatgatcctgacttcgtggtatataatttcatttgatagggcaaggcatatgtaattcaataaagatatagatgttactgatgtacatgagagccttgtgggctgagttcccttatagaagtggagtttgtgcaatcttgaaaatgggtagcatctggataagaaaagaatcaatcaagtaagagaaatgtcccaaaattgcttccacaatgttagaacagcttccttcagaaaaagctacatagacatttaaatttaaaattatagcatcttacaaacaaatatataaataccatttacttttatgtctaatacatttagagaaagtatctaagtcaatgttaaaaattctatttcaaatcctcgcatgcatctcctttcactaattaaataatagtgaactgtgttttgaaatcatcagacacttcaaaattagttttcttttcaaataatgcaatgtagtaaaatgtggacttgcaaagttcttattttactgtgattcttctatgaaaataatgtagaactacttaaaatttttccttaaattttccacaagtgtaaagtaggtaaaacaccacaagcaatatttgatgaattattacaatgtattacatgtcttttacttaatatgagttatacactgagaactttttttttcacaataattctccgagatgaagataaagtggatgaaaactggaagtaaagatgtattcaccctacaagacttaatagtgagactgcgcttaactcaagattgcgttggccaagggattaaagaggcagaggagaaactgcttccaatgttgtttcccaataaatcaataaaacttgtcaggggttttcacccaaggagagagtaacactaatctctaacttcatgtatacattttttccaggcttttggagcttgtcaatgattcccaaacttggctttatattagactcacccagagacccattaaaatcccaatgtcaccaggcatggtggctcacacctgtaattcaagctatgtgagaggttgaggcagaaggatccctcaagcccaggagtttgaggctgcaatgagctgtgatcatgccactgtacactagcccaggtgacagagtgagaccctgtccccttctccccaaaaatcctgatgtccaggttatcaaattagaatttttgaaggtaggattgaggcagtggtactaaaagcaaagataaaaagaagcaagcaagcaaaccacttgattctaatatggaacaaaggttgagaatcaccagatagaaaaagaaaacaaattcatcaatactgatcgtctattacctttaaataacctagatctcaagagatcccaatatacaaaagctttggctaggacctgagaatctattataattagcattttcattaatcttaatatctcactcatatcatgcacaaaattcaatgtaagatggatcacagacctaaatatgaatgctaaagcttctagaagaatactttgaggaacatcataatgatcttgggtgagataaataatgattttttttctagagcacaaaatgtattaaacataaaataaaaattgtgttaatgtctttactatattaaacttatattcatttattcaaaaaaacctcattacatatataaggaactcctacaacaacagaaaaagataacttataaaggggggcaaaaagattgaataaattttcttcaaagacatacaaatagccaaaaggtatatgaaaagatgttcaacatcactaatgatcagagagatacaaataaaagccaaaatatgatatcacttaccactcattaggagaggcattatgaaacaaaacaagacgtaacaagtgttggcagtgatgtggagaaactggaacccttgtacgctcttgctggggatgtaaattggttcggccactgtgaattacagtatggaggttcctcaaaaaaactaaaaatagaactaatatatgatccagcaatcctactcttgggcatatgtccaaaagaatggaaatcaggatgtggtagagttacctgcatacccatgttctttgcagcattactcacaaaacaacaaaatttgaaaacttaaatgtccatcagcacataaatgaataaagaaaatgtggtgtataaatacaatggaatattttcagctttaagaaggaaggacattctgccatctgcaagaacatggatgaacctggaggatatcatgctaagcgtgataagccagtcacagaaggataaattctgcatgatttcacatatatgagctttctaaaatagtcaaactcatagaaatagagaatagaatggttaggggcaggaggaagaagggttgctgttcaacaggtataaagtttcagttgtgtaagttgcataagttctaaagattttctgtgcaacatcacgcctatgcttaacagtgctatattgtacatttaaaatcttactaagaggatagatcacaagttatgtttttacctcaatgaaaaatgaatagaagtgtcacagttagataacacatttgaaatacatagacctgacaaaatatttctatggaaagtaaataaatcctacaaattgttatgcagaagatacatcactcaattagaagtgggcaaaagacttgaacggtcagttcataaaagaagacagccaactggggaatcaggataagaaaatgtgctgaaatagttggtcatcagaaaaaatgaaaataaaaacctcagtgagatgtcattacatatccaagagaactggtaaaattaaaatggctaaatacctggagaccgatatgggaggatagcttgagcccaggagtccaaggctgcagtgagctatgattgtgccactccactccagcctgtgtgatagagcaagaccccatctcttaagaaaaaaaactgagtactgaatatagcaagtgttgaagaggttatgaagcaaagaaaatctcatacatttgtggtggaagagtaaatttacagctatattttaaagaagtttggcaatttcttataaagttaacctgcacacacactcagtgatatcgtgattcaatttataggtatataccaaaaataaatgagggtgtgtattcacacaatagagacctatataaaattattcacagcaggttgtttttgtgggcaaaaactggatgtaacatctataaagtggagaagagataaattatgatattgacttacagagtaataatacatagcaatacaaaataaaatattgacacataaaacagcatagataaatctccaaaacatcatgttgagtaaaataggtcagacacaaaagcataaaatctatatgattccagacaaatttgaccagtggttattatcgactggaataaagcaccacaatattttctgtggtagtgaaactgttctttatcttgatatggctggtgtgaatatgagtgcagaaatacataaagttaaagtacacatcttaaatttgttcattttatgaaatataaatttggccttggtaatgcacctccaaaattttttattagggctataattaaatttatatttttctttataaaaatgcatgatgtatcacattatatttgaatatttttctaatagaagaccttatggcttaaaattgagtattctgtttaatacttatcataaatttataatttaataagtgatttataactgcacaataacattacaacaattttatgtttgggtaaaattgtctttattttaaatttaagtagtacagcaactttacatggcttacctaaaccacacaattattaagtgatataattgggactctaatccagggctgtttctaagtaatatgttcatctttcttcaaattgataacttgaatacatcttttgaaaaaatttttattaatttttttaatttaattaattaagatactctcaaattattgacgattatgtggttcttataacactagatgggttaaagtcatacttttgacttctattatttatgtgattttatgtgatcttggccattcagcctttttttggtaaaaagggaatgataatatctctcaagagtattgcaagatttaaatgaaattaaatgtgttgaaagcttctttaagaaatgtacagagtgcatagaagaatctcaatttttataagtttctcaattttccctttacattttcattcttattgtcatctgtctctcactgatgctgctgcttctcatgtcgccccctaagtgcagactagttctcaccctcagtgctctaaccactgcctctagaagtaaaataagtgtcctcttgcagaatacttctacttccttctcctcaaacccctccagcttggaatctcatactatttgattatattgatcactctcccaatgtttagtcactttccctcattctttgcagtctttacaacctgacttaactgccattattttgatgtctcatttaaattacttatcttctttgacatttgacctcatcatttccaatgtacttgctatcttcagtatctagctattcaatctcatgatctcagctcaaaccacgttattactcctaattgcaaatttttacaatctaacttttaagtctcctgccttctgaacattaacttctatctttctagttcattccatttactacaacttcaaaaatactgtgactcatcctggatctacaatctcatacaatatacaatacagtccttacacaattctcaatccagttttctccacacatcctttacttctcagcaaacccaccttcaaaacatttaaataatttttactactgctgttatccacccaggccaagccaaaatcatgtctctgaatttttatcccccttcctgcttctgcattagccctcaccctcagtctattctcaatacccaagcaagaatataacatagtatcatggagatcatgccactctgctcactcacttttaaggacttctaattccactctgggtcattattgtacagattatacagctctactcatgctccccaccaggcacacctctttgattacagccctgttgctcttcccctcatgcctctgttccagttttgctgtacccaacacttcctggtgctctttgggcaggctgggaattgtctctgtgttagcccattttagcagctataacaaaataccatagactaagtagcttataaatgacagaaatttatttttcacagttctggaagctaagtcccagatcaaagtgctcacatattccatatatgatgaggccctatttcctagttcatagacccatcttcttcttcacatggtggagtcgtcatatggtggaagggacaaaccaaccccctcaggcatcctttataaaggcaccaatctccttcatgaaggctctgtattcatgacataatcaccttccagagaccttaacttttaatagtatcatactgtgaattacatttcaacctatgaatttggaggggggtggttgtcaacattcagaccatagcactctcacattagatgctttgtacatggtttctctgactgaaaacacctgtcttcaagttcccccctgaattgtttccttatctcctggattagttccttctcatgctgctaataaaaacatgtcctagactgtgtaatttataaaggaaagagatttaattgagtcacagttctgcacagctggtgagacctcaggaaacttacagccatggtggaaggggaagcaacacatccttcttcacgtggtggcagcaaggagaagtgccaagcaaaatgggggaaaaaaccctgataaaaccctcagagaacatgagaattcattcatatcacaagaatagcagcgtggaggtaactgcccccatgattcaattgtctcccaccaggtccctcccatgacatgtggggattatgggaactaccattcaagctttagatttagtgggggacccagtcaaaccatatcaccttcttcaagtctttcactcaaatgctactgtctccgtcatgccttccttatttccctacttaaaattatatctcctcctcgtgttctttatttgctttgtctgctttactttcctccatagcacttagcaacacttaacatattatatagtttaattatttatgttgttacacatctccttccaagagaatgtaagctccaaaaaggcatatttttctttattttctttttttcactgctatatccgcagtgtctacaatacaatgtggtacaaggtaggagcttaatgtgaatgaatgaatgttagtcgtattaccttttaagtttaccttattttctaattttctacattttccacattccttcatcctttccaccttcctacatcctgtgggatgtgcatacagaaagcagcaacattaaggtaaaaagttcaacctttggattaatatttaaatcttgagacagttttgcttttctgttgcctttagcaaaaccacattcctgctgctgtcagttatgatgcactgagaaaacttcagagacctaaactttttccagagaagagaagctttactggtgttccagccctaagatgagaccagctaatgcatcctggtttatattttattttgtcgcctttattcgctttctctttatttttcttttcttctttcttacattgtatttctgtttggaaaagaccatgtacaaacagagtaatatgtggatccatgcctatccatcttagtataatcatgtattcattgtgctttgttgtatacatttggtacgtattctaaatatggacatatgctatgtatcataatgtacataaccatttctctattgatagactgttacagtattttcaatttctgataacagcaaaaatgatccttcagttgctatcatcaatatttatttgtacatatcaatgatcattttagaggattaaaaacagaagaagaatttttagggaaaccatgtatagttaaaatgtgtatatacttttcacattttcatagataaagagcatccctatttttttccccactaacaacaagacaagatggctggagaaaaataaatcaccaaatatcataaagatacttgcatgttttataagtaattaataactactttctcataacagtaaaaactattttgttttgtatgagaggatttttcaccctaacttttaaaaaatcattacatacaaatatatcacatcaaacccaaaagccattgctagcacactggttcctgtcttaatattaagtatgagataaaaggcctttatcttccagaaagttgttcataacatgccaaatatgtgaacacccaatagtcaaaggacattatctctatgatgtaattttgaaagttggtaaaataattgtttatcaatttcatcctacaagcacacaatttaaaccattcttttaaagtggattttagaagattggaatagggagttatagaagtcaatccctccacaaaaactgccattaaactggaaaaaataagaattaacctttttggaactctggatcctaatcagataaataacaaccattagtagactgcttgatgctattggcctttagtaagaaaatggctgtatgcacacaccagatactatcactcattcttattcacaagagtcaaaaagtgaaaacaaacctgtatgtgtagataaacaaaatgtggcatgtacatacaagggaagattatttagccataaaaagggaatgatgttctgatacatgtttacaacatggataaaccttgaaaacattatgctaaacaaaataagccagacacaaagggacaaacagtatatgattctacttatatgaaagatcatgaatagtcaaattcatgtagagggaatgcagattgcatgtctccagggcatggaggctggggcaaagggaatggagaattagtgcttaatggtacagaacttctgtttgatgtgatagaaaagttatgaaaacagtgttaattatacaacattgtgaatgtattcaatatcactgagttttagaattgaaaatgattaaatggtaccttttatgttatgtatatttaccactgggtaataaaattgtattaacgtagaggcaattttaacagttgtaccactctggaggaagatattgataatgaaggaggccatgcatgtggaggcaggatatattacatacataatataatatataatatatattatattatatatacacattatgtcagggtgtgtgtgtgtgtgtgtgtatatatatatatattatgtcagggtgtgtgtgtgtgtgtgtatatatataatataccctgcctccacatgcttgttttatatatatatatagtaatatatggtatattaccatatataatatatattactacatatatatggtaaatctctacgtcttcctcttaatttttctgtgaaactgaaactgccctaaaaaattcaagtcctacaaaaatgaaaatgagttagagtacttttttttttctttgaaacggagtctcgctctgtcgcccaggctggagtgcagttgcgcgatctcggctcactgcaagctgcgcctcctgggttcacgacattctcctgcctcagcctccggagtagctgggactacaggcacccgccaccgcgcccggctaatttttttttttttttttagtagagacacggtttcaccgtgttagccaggatggtctcgatctcctgacctcgtgatccgctcgtctcggcttcccaaagtgctgagattacaggcgtgcaggcgtgagccaccgtgcccggccgagttgaagtactttttctggaacaaagaaacttagcataaatagttaaaatagtaagaattgtaattaagggaaatttcagctcaatatgacttcaacagttttaaaaatgtattatttcacataagaccatggagagaagcattggaagccccagaattgattgggtcacaaattgaaaatgatattatcagtgacccaggtttgaatgtctctccccacagcattgacttcactaatggatgtgacctggttggcagcagtagcttgcacaacatgcttgtttgcagtgagtagtagagagaaggttttgctttcccagaaactctgaaaaaggtcatcaaacctaaatttccttagcctttttcttccatgagcaaatcactagcagatgattgctagcaaggtgttactattacaatgaacccctaagtgtcagagaaagagttagtttggggaaatatcctctccaccacaatcttagtcattgaagtcaatttaacaatatattgaaatatttttcttagaagtttaaagttccattaaagagtagcaattacagaaattataggtagcctttagttctacaagtgacatttcaaaagggagatgattcatcaatttcaaactttgcctgcaaataatactggatgaaaattaacttggcaaacataattaataatcatgggttattaattacttctgcaaggtgggtgtgctgattttaaaagccttgaataaaacataaatttccttaatttatactgtaaatggagtaatttggtgatgtaaatggtaatatgtaagtgacttctgcttcagatcttacaacttaaaatatttttctaaaattagtttttgtaccatctctccagcatgttccagcctttatcagtcagtccaggcttctataacaaaatatcatggactgaattgcttacacaacagacatttctcacaattgtagaagctggaaagtgcaagattaaggtgctagcaaatttgtttcctggtgagggtcctcttcccggcttgctgtatcctcacatagcagatagagagagaaagagagagagagagagagcactctatagactctcttcctgttcttctaaggacactaattccattgatgagggccctacgctcatgacttagtctaaacctaattaattctcaaaggcctcacttcccaacactgtcacattgtggggtagggctttaacatatgaaatttgagggaaaaggaatgttcagtctagaacaaggccccatacatttcaaaaagctgtgggacaggagggaatggagatggtattcaatggtaccacatccaagcaagtcttgtatggttaaaacaaatcaatataataacatgaaattttacacagaaacctatctgattataaactgtatgcttaccataatcaacactgatgtacattgttttaaaaatacttaatagtgttctttgtttaaccaaataatagaggtattaactagtttcctagtgctgccaaaagaaattgctacaaaatttgtggcttaaaatagtaaaaaaaaaaaaaaaaattctcaattatagaggccagaagaccaaaatcaaggtggaggcagagccatacatcctctgacggctctagggaagaatgcttccttgcctcttctagcttctggtggctcgtggcactccttggcttgtgacagcataactctaacctttgtctctatcttcacatgaccttgcttgtgtttctgtgtcccaaatacccatgactcactctaaattcaggatgatctcaccctgagatctttaactttattatatctgtaaagctcctatttcaaaataaggtgatatttacaggtactggaatgagagcgggtctaggactcagacacacccttatgaggatactacatgacccattacaaggcacaaagtaattaccataggcaaaccgctgatgagagctcactccagtatggaatatattcatgtttccatataagagaaaaattcgtccctggttcagttcatcttggcatcagtacatgggtgggattcagagacatgtaggtgtggaataccagattccaccaaacttaaaaagctggcatactaagttgataaacaatgtagagtgtgaagttgagttgagaatgcttatgccatacagtttatgtatcttataatagccttaatcacacttccagtaactttccccatcattgggtgctaaaaaataaaattaaagaattagaataaaaaatatatatacctctttgagtagaagaatgctgtcagcacgttttgttattttattccattgtataaagtctcagtagtgctgtcttcataaatgtattgaaggtttggttaaattatatcaaatttgtgattaaaaacaaatgtgaatagtataaaacattacaaagggcaatctgaatactatgctataccaattttacaattttacaatgacttacagatgccataaatatttactttaagggagtaaaataagtcataaagtcatatttaagaacacctaaatccttgaataaatttaaaatggtattattatttacgtaggaagtcagctgactattgaaagcttatttttcaataacagaaatatatgcattatctgaaacacatattccaatattttcaagaaacaaaatactgaattaaattatctgtatttaaatgtttattttggttataaaggtccatgaaaatgcttaaagttggtttatttgatctaaaaagttaatatgcaatttttatttttaatgtatcatttttcccatttattcttttctaaataacactttcatcttaagtagatgactgaagaaacaaaatgctgttttctttatgaacttgtaatacatttcactaataattaggatgctgttcaaggtgttgaagtgtacaatataacaaattgcatttgcagttgaatagtagcagagtagaagctgaaataataaatcatgtataaaagtagcttaaaacagatgatagcagagcaaagagtttcctgccaacgccctctaaaaatcggtccttttaggcttttgtgctggtactaggtttcagttatagacaagacatatatatctgaccttttcctttccttttctacaccctggggtcaaagtctcctataaaaggacatttgcagcaagtattttcagctggagtaggaggaaagggcaggagtaggagagcagtatgatcacctcttgccaatgcaatttcacttgatttgcaactggtgtttagtaaagaattttgctatgcaaacatagtgtcttaattggattattgtaagacaaagtatgcatttttcatgtcgtattagtattttattaataagactagggaaacccactaaatccctaaagtgaatttgattctcccatagaaacttaaatcctcagtgtgacacaactcagtccttctactgcagcagctcttttataaaagcctcccgaagctccaagaaggaacaaagaatgtgacccagtaagatcacaccatgagtctatattgcagaaaccttggttcaacaaaactgcagatgctctgttgaatccactggagattgtcctgatactaaggacaagtatgtaagttaatgattttatttattttaacattttaaaatgttttcctttggggaattctaatttatatatcaatattcaggtaatatttgctgaaaacacaaacagagtcaaaatgatctgcattcacattctcattttctattataacatagagacaactactttattatctttttagaaacttttgcaactactttagtttcttcctaattttataaattaatctatctcaaaaaactttgcccaaaagacttagtaatagctgtcaacttcagaaaaactaaaactttaaagataacttttagaaggaaaatgaaatacagaaataatgtatctcatttacacttaattaaaaataatatgaattgtcactatttcctatgaaaacatctcatgccaatttcttttattaagctaggatttaaaagataatttagttgaaactggtagaatcttagtaaaattataacaataagaaatttttatattttatgtataatatagaataatcacatttaattccagttgttagtctattctgattctttagcaagttgattcataatttgccaacttgggtcagaaatattttctattcttagcttttgctgtcagcagagataataataatatagaacctgaacaacaaaggattgtgtattgtttcaatttaattaaagttgattccctgctttaagagagactcacattttatatatttttttattaaaaagagaatgtagatatttgcttttccaaatttcccataagataagaaaaacatattttttcttaattacacccttgctaagtcacgctagctgcctgaccttggacaaaattcttaacctctttgtgtctcattttcaatacctgtgaattaaagatgattattgtagtatatttctcaagggattgttgtgggaattaaataaaataatcctctaaaatgcttagtacagattctggaacataataagcagaaaaaattaataacttattatttttatttactatattatatgacatactttttctttatgatcttcaggggaatttctactcatcttaaaaacatatatagatattgatctgcggagaaatatatctctgttatttcaaggtctgtggattacataatggtcaactctgattgatttactgattgattcaaaaaattttaaagcaaaactaaaaatattgcagctatgttggttttaaccattctaaactctgatgaaatttgctttctgtttggtttgtgactaggaagctaaacattatttattagtaatgaaaatttctggtgtctaaaaaaattcaagaggaaaaccattagattctattacaattaaatctgttaagatttaattgcaaatatgtagatagtgcaaatatgtcttagggtacaatttttgttctcattaagttacccattttacattttgagaacactaacagatgaaatacttgtcaaagagaagatctaagatggtttaaagaaaatattaaatgaaatcaaacttacttgtcaagctccatagcacaacttacaagtcataaatcacactctgtatgacagctatgggagggatctgggtagtaaaataaaatgatggattttatctttcctgtttttgagttattaagaactagttgaactatagaatgacgtgaaagactcacatcagggatgggaggttatttgcagaaactcttattttctttatcacattaatgtcaatatttgacatttccatacgactaattattgaactaatttttgatttcttatgccaactgttaataatcctcttttcatccagaaaacaatcactttttgtctatctgtaaattgacatttgttatgttaatttgtttttgcttattacaaggattatcttttatttacaacaaagcattcacagattgccgtgacagatttgtcttcaatcaaatctcataaacattaattgagttattgaaaggaatttgtaaattattgtgttttttctaaaatagtaacatcagtgtgtatattacgttaattttgtttacagttttttgcttcacattaactatatttaactgattttaacagccttagataactccaaaacatcaattactttacttggatttattaattcattcaaaaaatatatatataatgagaatctattatttgccaggcactgggctaggcaaaggtaagagtgaatggcaaaatcatgttctccctgttttcctgtaatatattgtctggctaaagactgtgaaggaagagtaatgtgaaggaagagtattcgaaggatataagaaaagggatcacacaattaactgtatgtaggctgttcttagggaagatttcttctagaggtggtacttggccttcagtcagaagcatgatttgatatttgatgttaaccaggtaattgaggggataaggtgctttctcagcagaaaagacatagtaggcaaagtctttaagataaaagcatagtgaaagctcaaaactaaaaggaggcttgggtgtctggactccagagacaggaagagagtttatagagtctagcagagatagcagagaagactttatcttttttttttctttttttttttttctgtagcaaacatctttcctgtgaaaaattccctctcctagtactttagttctgtggatccaaaatttatagcattcttctaccaccacaggggtgagtatataataaaaaatgtcagttattcgagtatgtaagaaacttggaagtcatcactcccatccttacaacaagaaaaatgctgtacaaacagactatcaacaactcattttagatccattagaggactgaggtcacagaaaaactgctgcccccaccctaaatccccactaaattagagagatgggaaaatgcaaagaattatagcctagtggagcaaaggcccaggagcccccacaggagttagtaatggagtagaaaactttaatatgcagttgattaatttctggaagcgcattgtggacaagcttgagagttaactttgaaaaatatataacatgataatactaattaaaagaaagctggattaatatattaatttccaacaaaaagacttcagagaaagaacaattatagggggatacaaaggggtattacatagtaacaaaggatttaattttccaagaaaacgtaacaatccttaatgtgtttgcatgtaacaggctgtcaaaacacatgaggtgaaaacagatagaactgcaagaacagacagataaatccactatgataattggaggtgttaacacctctctatcaataatgaatagaaccagcaggtggaaaatcagtaagggcatagttcaactgaatagcaccaaaatcagtgagtcccagtctctcttcccggaagttgattcttgagcagggacgtcaggagtagagtgatgtccaggccatatttaataacaaataaatcagagtctggacatgatatgtaggcattcgtttctttaaaaaaaaattgtcccaggtgattccattgtgaatctaatgttgagaagaaatatgcgcagtggttttctttgaattc

SEQ ID NO: 7 - DNA, 4487 bp, Homo sapiens
gcagctggaggctctgtgtgtgggtgagtttagccccatcccctaggtgttctccagcttgaggatcgcaggcagagaggaccagcccagcagccacaggcctgaccaaagcccaggctgggaaggagggcaactccccattttccactgggaggtgtttcacagcacagtcaacataggtgacctgcaaagatcctcatgtttgttattttctttggccagatccatccctacagggttcagcagggcctacaggaggggcagtgagagaacagaccccaaaaagaaaggggactccatgactgaccaccttgaggggggccaggctgcgggccccgttcatcttttttcattctcaggtcgctgatttcttggagcctgaaaagaaagtaacacagcagggatgaggacagatggtgtgagtcagtgagtgagtgacctgactaatagcctgggagggacagggcaggttttctgcagagcacggaagattcagctgaagtcagagaggtgaagccagtttcccagggtaacatagtgaggcactgaaagaaaggagactgcactggagcccaggtccccgggctccccagagctccttactcttcctcctcctcagcagcctggagaccccacaacctccagccggaggcctgaagcatgaggccatgccaggtgccaggtgatgctgggaattttcccgggagcttcgggtcttcccagcactctggtctcgcccgccctgcctctcgggctctgcccagcttcctgagtcctgacagagcacagtgggggagatgttggcagaggtggcagatgggctcacggccatccctcctgcaggagcagcgactggacccagagccatgtggctgtgccctctggccctcaacctcatcttgatggcagcctctggtgctgtgtgcgaagtgaaggacgtttgtgttggaagccctggtatccccggcactcctggatcccacggcctgccaggcagggacgggagagatggtctcaaaggagaccctggccctccaggtactgtgctgcagaccccaccctcagctgagggacacagaccccttttcaggaggcccatctgtccaggcccctaggctgtgggccatagtgagctgggggctatagtaagctgggtgggacttcagtctgcagggctggtgggttcctggggcccttatgatggcgcatcctggagagtctgtcctcatagtgcccacggagtgatagagtgatagctgagccagccctggtgataatgggcatcgagtctcactagctccaaccagttgtgggtgacagatcctacacatccatgtctcttttctctgcaggccccatgggtccacctggagaaatgccatgtcctcctggaaatgatgggctgcctggagcccctggtatccctggagagtgtggagagaagggggagcctggcgagaggggccctccaggtgagcagggtggggcaggtgggcagtggaaacatgggcacagcgaccctgaagtcagttacacggggatgatggggatcagacaaaccctacaggttccccaagggcatttggctcaacctaagtaagagaggataagcttgagggagaaagctgaggtgtctggggagtgtggtcacaattcagggaaaggcaggtgtgggaagtcctccgtgcctcatgaccaccgatggggacacactgagtcaggtgtgggatgagggacagcactgggaggcaggggaggcatgtcctgggatggaggccctgggggctgtctgaagggtgaatgcggacgaggcatccagacagacggtgtgatcaggagccccacagacagaggggaactttgaagctcagagcggtaagcaagtccatcagggcagtgcagagagcatcatgcttgcccttggtggagggtgcgggagagggacttgccccacagaggcgggcagacagaacccctcgagggacagagcaggaaagaggacaaggggtgggggtctcagcaggggcaaggcttcactaaagaataggggaccacggggtgtggagacacactggaatcttgtggaccctctgagcctagggtctgggtggcgcctaacagcaatgaaagggcagagttccaggattgcagatggcaaaacacctgcgtggcagcaagtgggagtcttcactggcctgcccctccttctgtgtggggcactctccacagggcttccagctcatctagatgaggagctccaagccacactccacgactttagacatcaaatcctgcagacaaggggaggtaaggggaccccctgggcctcacggggtaggagtttcccacaaattcccctcattctcagcaccagcttctagaacatagagattacaaataggcatgcacatgcaggtcttggggaaaggaatgacgcttgcttttctgatgtctttgaatggcccagaggagacagaagcagacacaattcactccccatttcataggaaagcaagttctccacctgccttgctttccactgaattccaggaaattgcaccatttctggcaataagtaattgttacttaggtgaatgaataaatggaggagagtctaaaagtgaatttagaaaactgcaattggaagaggaagagaagacacagagagaggcagagatggagagactggggagaatctggtagcagagaccccaggtgagggaggtggcttagagacaaagtggtcagtggcctgacccggactcctctgctctcagccctcagtctgcagggctccataatgacagtaggagagaaggtcttctccagcaatgggcagtccatcacttttgatgccattcaggaggcatgtgccagagcaggcggccgcattgctgtcccaaggaatccagaggaaaatgaggccattgcaagcttcgtgaagaagtacaacacatatgcctatgtaggcctgactgagggtcccagccctggagacttccgctactcagacgggacccctgtaaactacaccaactggtaccgaggggagcccgcaggtcggggaaaagagcagtgtgtggagatgtacacagatgggcagtggaatgacaggaactgcctgtactcccgactgaccatctgtgagttctgagaggcatttaggccatgggacagggaggacgctctctggccttcggcctccatcctgaggctccacttggtctgtgagatgctagaactccctttcaacagaattcacttgtggctattgggactggaggcacccttagccacttcattcctctgatgggccctgactcttccccataatcactgaccagccttgacactccccttgcaaactctcccagcactgcaccccaggcagccactcttagccttggccttcgacatgagatggagccctccttattccccatctggtccagttccttcacttacagatggcagcagtgaggtcttggggtagaaggaccctccaaagtcacacaaagtgcctgcctcctggtcccctcagctctctctctgcaacccagtgccatcaggatgagcaatcctggccaagcataatgacagagagaggcagacttcggggaagccctgactgtgcagagctaaggacacagtggagattctctggcactctgaggtctctgtggcaggcctggtcaggctctccatgaggttagaaggccaggtagtgttccagcagggtggtggccaagccaaccccatgattgatgtgtacgattcactcctttgagtctttgaatggcaactcagccccctgacctgaagacagccagcctaggcctctagggtgacctagagccgccttcagatgtgacccgagtaactttcaactgatgaacaaatctgcaccctacttcagatttcagtgggcattcacaccaccccccacaccactggctctgctttctcctttcattaatccattcacccagatatttcattaaaattatcacgtgccaggtcttaggatatgtcgtggggtgggcaaggtaatcagtgacagttgaagatttttttttcccagagcttatgtcttcatctgtgaaatgggaataagatacttgttgctgtcacagttattaccatccccccagctaccaaaattactaccagaactgttactatacacagaggctattgactgagcacctatcatttgccaagaaccttgacaagcacttctaatacagcatattatgtactattcaatctttacacaatgtcacgggaccagtattgtttcctcattttttataaggacactgaagcttggaggagttaaatgttttgagtattattccagagagcaagtggcagaggctggatccaaacccatcttcctggacctgaagcttatgcttccagccaccccactcctgagctgaataaagatgatttaagcttaataaatcgtgaatgtgttcacatga

SEQ ID NO: 8 - DNA, 4556 bp, Homo sapiens
aacttggaggcagagacccaagcagctggaggctctgtgtgtgggtgagtttagccacatcccctaggtgttctccagcttgaggatcgcaggcagagaggaccagcccagcagccacaggcctgaccaaggcccaggttgggaaggagggcaactccccattttccactgggaggtgtttcacagcatggtcaacatggatgacctacaaagaccctcatgctttgatatcttccttggccagatccatccctaccagggactcagcagggcctaagcagggggagtgggagaacagaccccaagaggaaggaagacctcatcactgactgtgagagggtcatcaccccccgatgatcaccttgaagggtccaggctgtgggccctattcatctcttttcattctcaggtcgctgatttcttggagcctgaaaagaaggtaactgggcatatgagggacagatggagtgagtcagtgagtgagtgacctcatccttccttctaacagcctgggagggacagggcaggttttctgcagagcatggaagattcagctgaaatcagagaggtgaagccagtttcccagggtaacatagtgaggcactgaaagaaaggagactgcactggagcccaggtccctgggctccccagagctccttactcttcctcctcctcagcagtcttgagaccccacaacctccagccggaggcctgaagcatgaggccatgccaggtgccaggtgatgcttggaattttcccgggtgcttcgggtcttcccagcactctggtctcgcccgccctgcctctcgggctctgcccagcttcctgagtcctgacagagcacagtgggggagatgttggcagaggtggcagatgggctcacggccatccctccggcaggagcagcgactggacccagagccatgtggctgtgccctctggccctcaccctcatcttgatggcagcctctggtgctgcgtgcgaagtgaaggacgtttgtgttggaagccctggtatccccggcactcctggatcccacggcctgccaggcagggacgggagagatggtgtcaaaggagaccctggccctccaggtactgtgctgcagaccccaccctcagctgagggacacagaccccttttcaggaggcccatctgtccaggcccctaggctgtgggccatagtgagctgggggctatagtaagctgggtgggacttcagtctgcaggggtggtgggttcctggggcccttatgatggcgcatcctggagagtctgtcctcatagtgcccacggagtgatagctgagccagccccggtgataatgggcatcgagtctcactagctccaaccagttgtgggtgacagatcctacacatccatgtctcttttctctgcaggccccatgggtccgcctggagaaacaccatgtcctcctgggaataatgggctgcctggagcccctggtgtccctggagagcgtggagagaagggggaggctggcgagagaggccctccaggtgagcagggcggggcaggtgggcagtggaaacatgggcacagcgacctgaagtcagttacacaggggtgatgggggtcagacaaaccctgcaggttccccaagggcatttggctcaacctaagtaagagaatatgaatttgagggagaaagccgaggtgtctggggagtgtggtcacaattcagagaagggcaggtgtgggaagtcctccgtgcctcatgaccgctgatggggacacactgagtcaggtgtgggacgagggacagcactgggaggcaggggaggcatgtcctgggatggaggccctgggggcagtctgaagggtgaatgcggacgaggcatccaggcagatggtgtgatcaggagccccacagacagaggggaactttgaagctcagagcggtaagcaagtccatcagggcagtgcagagagcatcatgcttgcccttggtggagggtgcgggagagggacttgccccacagaggcgggcagacagaacccctcgagggacagagcaggaaagaggacaaggggtgggggtctcagcaggggcaaggcttcactaaagaataggggaccacggggtgtggagacacactggaatctcgtggaccctctgagcctagggtctgggtggtgcctaacagcaatgaaagggcagagttccaggattgcagatggcaaaacgcctgcgtggcagcaagtgggagtcttcactggcctgcccctccttctgtgtggggcactctccacagggcttccagctcatctagatgaggagctccaagccacactccacgacttcagacatcaaatcctgcagacaaggggaggtaaggggaccccctgggcctcacggggtaggagtttcccacaaattcccctcattctcagcaccaccttctagaatagagatgacaaacaagcgtgcacatgcaggtgttggggaaaggaatgatgcttgcttttctgatgtctttgaatggccaagaggagacaagcagacacaattcactccccatttcataagaaagcaagttctctgcctgtcttgctttccactgaatcctaggaaattgcaccatttctggcaataagtaattgttacttagatgaatgaataaatggaggagagtctaaaagtgaatttagaaaactgcaattggaagaggaagagaagacacagagagaggcagagatggagagactggggagaatctggtagcagagaccctaggtgagggaggtggcttagagacaaagtggtcagtggcctgacctggactcctctgctctcagccctcagtctgcagggctccataatgacagtaggagagaaggtcttctccagcaatgggcagtccatcacttttgatgccattcaggaggcatgtgccagagcaggcggccgcattgctgtcccaaggaatccagaggaaaatgaggccattgcaagcttcgtgaagaagtacaacacatatgcctatgtaggcctgactgagggtcccagccctggagacttccgctactcagatgggacccctgtaaactacaccaactggtaccgaggggagcctgcaggtcggggaaaagagcagtgtgtggagatgtacacagatgggcagtggaatgacaggaactgcctgtactcccgactgaccatctgtgagttctgagaggcatttaggccatgggacagggaggatcctgtctggccttcagtttccatccccaggatccacttggtctgtgagatgctagaactccctttcaacagaattcacttgtggctattagagctggaggcacccttagccacttcattcccctgatgggccctgactcttccccataatcactgaccagccttgacactccccttgcaaaccatcccagcactgcaccccaggcagccactcctagccttggcctttggcatgagatggaggcctccttattccccatctggtccagttccttcacttacagatggcagcagtgaggccttggggtagaaggatcctccaaagtcacacagagtgcctgcctcctggtcccctcagctctgcctctgcagcccactgcctgcccagtgccatcaggatgagcagtaccggccaagcataatgacagagagaggcagatttcagggaagccctgactgtgtggagctaaggacacagtggagattctctggcactctgaggtctctgtggcaggcctggtcaggctctccaggtggtcagagggcccagtggtgccccagcacggtggtgcccaagccaaccctgtgactgacatgtacgattcactcctttgagtctttggatgccaactcagccccctgacctggaggcagccggccaaggcctctagggaagagccccccactgcagacatgacccgagtaactttctgctgatgaacaaatctgcaccccacttcagacctcggtgggcattcacaccaccccccatgccaccggctccactttccccttttattaatacattcacccagataatcattaaaattaacatgtgccaggtcttaggatgtgtcttggggtgggcacagtacccggtgactcttggggatatttatttattttccctgagcctatatcttcatctgtgaaatggggataaaaatacttgttgctgtcacaattattaccatctctccagctagcaaaattactaccagagccgttactacacacaaaggctattgaccgagcacataccatgtgccacacaccttgacaaaatcttttaatacagtttattatgtactattcaatctttacacaatgtcacgggaccagtattgtttacccaattttttataaggacactgaagcttagaggagtgaaatgttttgagtgttatttcagagagcaaatggcaaagactggatccaaacccatcttcctggacctgaagttcatgctcccagccaccccacccctgagctgaataaagatgatttaagcataataaatcgttagtgtgttcacatgagtttccata

SEQ ID NO: 9 - DNA, 105338 bp, Homo sapiens
cctcccctcgcccggcgcggtcccgtccgcctctcgctcgcctcccgcctcccctcggtcttccgaggcgcccgggctcccggcgcggcggcggagggggcgggcaggccggcgggcggtgatgtggcgggactctttatgcgctgcggcaggatacgcgctcggcgctgggacgcgactgcgctcagttctctcctctcggaagctgcagccatgatggaagtttgagagttgagccgctgtgaggcgaggccgggctcaggcgagggagatgagagacggcggcggccgcggcccggagcccctctcagcgcctgtgagcagccgcgggggcagcgccctcggggagccggccggcctgcggcggcggcagcggcggcgtttctcgcctcctcttcgtcttttctaaccgtgcagcctcttcctcggcttctcctgaaagggaaggtggaagccgtgggctcgggcgggagccggctgaggcgcggcggcggcggcggcacctcccgctcctggagcgggggggagaagcggcggcggcggcggccgcggcggctgcagctccagggagggggtctgagtcgcctgtcaccatttccagggctgggaacgccggagagttggtctctccccttctactgcctccaacacggcggcggcggcggctggcacatccagggacccgggccggttttaaacctcccgtgcgccgccgccgcaccccccgtggcccgggctccggaggccgccggcggaggcagccgttcggaggattattcgtcttctccccattccgctgccgccgctgccaggcctctggctgctgaggagaagcaggcccagtcgctgcaaccatccagcagccgccgcagcagccattacccggctgcggtccagagccaagcggcggcagagcgaggggcatcagctaccgccaagtccagagccatttccatcctgcagaagaagccccgccaccagcagcttctgccatctctctcctcctttttcttcagccacaggctcccagacatgacagccatcatcaaagagatcgttagcagaaacaaaaggagatatcaagaggatggattcgacttagacttgacctgtatccatttctgcggctgctcctctttacctttctgtcactctcttagaacgtgggagtagacggatgcgaaaatgtccgtagtttgggtgactataacatttaaccctggtcaggttgctaggtcatatattttgtgtttcctttctgtgtattcaacctagggtgtgtttggctagacggaactcttgcctggttgcaagtgtcaagccaccgattgctttcttaggctatctatatggtctcttcctgagggctattgtccgttaatacagaatacagtacactgttagtggattagcgagctcggtaatccggtctcctaaatgaacaaaaaagtagacgctttttgaggttgagcatatttcgattaaatcttggcttaggccctagatcaagggtttagatcagaataaaatgaaaattagtgttgcacgtacgcatattgcatcagaatcttgcagtgattgttttagtttcctgagttgcattgatagattcttttaaaatatgactgatttgcataactttagaagcagaatcattttcagtatatatggtgcacattgagggcaaaaagtagttttgttaatgtttaaacttaagttacctacaactttgaactgtatgtagaagttttgtagtttgaagtcaatagtgccataatataccttataaggcgttcttactagatctttgttatatttacctttttctctccctatggggtgatgtaggatagtgcttgaaatttgcacttcagtagcatttaatgttcagtgctcttgtcataaacatagaatggatattgagtagtttctgatcccagatggtaatgtgtaggttcaagggtattgtgtgtagcaagtgaagattgcagaaataaaacttcagttcatgcttgaaatttaagtattgttgtgatgccagaattgctgctcaccgtttttaggtttcaggtcctctgacaccttttggtatcgttaattttactgatttgtgtagaatgtcagttgtattttaccagctaatatctagaaatgctggcaagaggggtttactccagctttagattgtaggtatgttagcttttttcatacagtgtattaaatttactgagtcagcttgctgaataagacagaagcccaagaattttaacagtgtgtagctttagttgtctaaaagttaggccttcgggcttcaaaagttagtggtcatcgaaaagcattaatctttgcagtttcaggtacaacacattggttttgattagggatggggatggggccctctttttgcagaatggggaaagtattgacaggaattgagagctattggtaggccagtgtataaggtatgtgaaaacagaattaagttattggtctgaagtgactgaagcatttaggctctatcaaggcctaaaatttggtaatatgagtttggtaatgcgaattgtggcagtggacaatatttagttaaaattatgtaattgcataagtactagcacagtatttttaataaaagttatttcttagcaaatgtcagttgcattttgtctaaaggtagagtgacactacagtgtctatatgtcctgctaaaaattgtggggaatatttttttttaagacagcgtttatatcgggagaggttttattccgttggattatgttagctgcatataaatgtgcacagttaattttgcccaagtttttgttttgaaatgaatgtaaaacttactgaagaagtagcttcccaaaatttagttttctgttaagccaaaaatattattttaaaagagtatttgcaaattttgaagttgacattaattgagaatgttactaaggctaaactggacccgcttgcccagaagataattatggaaaaattcttttgtgacttccaaagcagtctactattagcatgaattactgacagtcatccaaatatataggaacaaaaaattaaatgtttatgtaactttgaaaaaaaagcctttgaagaaaataattgaatgctgtctgggagacagatttctttcagcacttaaagtacataacacactacttttacttttcccacttgattttaaattatcagggttattaagaccttaaaattattttaccaggtttttacatgtgagctgtgacatgactggcattttctttgatttcagcgtatgttggtctctacacatgaaatttgtgtgacttaaaactttctctaaaactgtacttttagttatgatatgcatagaaagcagtatcaaatattgcgtcaaatgactaataacacttaatttctagagttgtggttttattgagccaaaagttgatatgaaaaaaagtcagtaaggaaagtcagtgaagtgcttgcttttttgataattgcactcccaataattttgatattccaacgtacttggtttgcttgttttcacgttaatgttttctgtttattggagtgggaaggcattaaaattgtcattgaagactttgtctttgacatgttgtagtatttatttcagtaactaacctgtgaaaagttaaattcctttatgaaagtagtgattggagtatttttatctgataaagaaagattaataatgaagccatttctccgaggaaaattgaggacaataattcagttttaaaatattatcgcaaaattaaattattctaaaaatttgttagtagggttatatgcttaatattagtctgaaatatagtgctgaatttgagactatagaaaaattaagtgtatttagggtatgtggaaacgttaggcttctgttgtatttttattgtttggtagatttgcctcttttcaaataaatgttcacagggaatacttttaacttgtagagagtacagtgactattgaagttacctaaattacctcaaggtaagtgattactgaaattaatcatgagggttttaaaaagtattctattcacaacatttattttacattgttttgtatctgctaagttatatttcctgaaaaacatgactggaccacctaattgctgtatgataacttacaaacttcatttttcatagtgcttattcaagtgtaaagcacaactgaaaggagtaatgtacagtttatatgaggaaaaaggaattttattgctgccagtgtaaaagtttgcacagcagtatagtcatcaatgcagatttacattgcttataatatactaagtaaatactaaatgattaaagataataaaatatggtgaggtataaccaccttcattttaaacttagttttagaagatagtaaagaaagattcctttattacctttttagaattttatttttaataacatgggaaaggcaactggtgatattttaatttttgtatggaacagtgcatctgctttctcatagccacataaaatacataaacttcttagtgttatgaaatggcttactttttggaagtgaagaagtcttcaattcttattttctaatgttattttgaaatttgcctccatttgctgtttgttcatttggtgatagcgcaacacttaaaaaaatattttaagccgcttctgaagtaatcacttcagtgacttttaatggaggagtatttgttatgggaaattcacttcacaaagttttaacattaattcacttgaagtaaacgtgctatttttaaattttcatctcaatcttttaagtaagacgaaagcttaggaaatcacttttattattgatattgtgtgtgacttcagagtttgtaaagagaattgtagaagtgttgcatgcatatgacaattttctgcttaattgaaatgtgaggcctctgccatactacaaggatttagcttccagaaaatgtaatattaacatagcttaagaaatgtatttttttttttctgtagaaaccgttgggttaaacaaacagttcagaagttttattacatggaacccattagttcttaatcttgttacctttttcttcattttttctgttaaacttgattttcacagtcagcattgaagaattcatcttgtggcctgaattcattaagaaaagatgttaggatttgttctgaagatagtgacttaggaaatttgtgagactggggtcagtcagttctgttttacaattgctttctatttggtagctttgaaattaatttagttgcttatcagagagaataatgttgaggttagactaaccttaaattggtaaggctttgctgagcaaactgataactgtaagtcttttatagggtgcattactgccacatatacgttcttccataggtggttaaaagtatattggtctgtgtttggtgattctctttgtacatattgagtatatgcattcactaatgtaaaataatttgccaagaaaggtgaaattagtatattgtacttgactattcacctttcccttagttttttgaatttttttcattggttgcagaggaagtattagcaatttaattcttttaaaataatttgcactggaataaataagtatcggcaaatataagaagagtaacataatttaagggtgaattaattttatttgggaagttttagttctgtatagttaaggcagattcttcatttgcaacagttgacattgggacatgtgtgaacatcttcaaggtattaggacatcttcaaggcattactttttggcagtgttgagaatttttttttttttttttttttttttgagatggaatctcgctctatcgcccagtctggggtgcagtggcaggatctcggctcactggaacctctgcctcccaggttcaggcgattctcctgcctgaacctcccaagcagctgggattataggtgcatgccaccacgcccagatagtttttgtacttttagtagagatggggttttaccaccttggccaggctggtctcaaactccagacctcaagtgatccgcctgcctcggcctcccaaaatgctgggattacaggcgtgagccactgcgcctggccagtgttgagaatattgagagatggatattgtagctgtacctgccatcaaaagaattttcttgacctccacatagtgtgaaaaagaagactgtttacacattatattttaagtaattatacacataattattatcagtactcaccacttcaaatatgaacagtgaatctaaccagtgtttgatttctctgtgtgtgtatgtgtatacaaagttagcaaaccttttatcttaatatttattaaaaaacgaatttttgtttctttaaagaaaagactaccttagagaatattgttctatagtttttaaatatggtcagatctattttaaattatgttaaaattttgagtattacgtttatctatacttttaagcatatatacattgtttcattttagattttagggaggcagtgtgggctctggagccagactgcttgttttgtaatcctggatcttccatttagtagctggatgactttgagtaggttatttagattttctcaatctattttatctgtaaaatggggatgataatggaacctaccgcatacgtttatcttgaatagtaagtgagataataataagtaatttcatttagcatagtacctgccacattgtaaatacttaaatggtagctactgctctgaaaaactgtaatttcaggttatgtatgtagggaaattatttgtattttcatttatggtgtatgattgtaactgaatttcctcagtttgggccatgttaggattttgtttcaagttataagtgtttttaaaaataagggtattcctttaggaagtctgggtatgacatgtctgtgattttgctggttcatcacaaatgggaaataaatctctgctaactcaaactgttgaccaaagtaaaattaattatgccaatcaaaaactatttgctttaaaatataaaaggcaaaaacttcctattagcataatgaagtagaatttttaaactttgttataatcttaaattttctttagtgttgaagataggtcaacttaactatcatacatttttattcacataaagtaaactctgcctcaaatgtaataaacttaatatgagttatgtaaactttggtcaatagaggtatattttttagcatttccttttgaaaatttcagccttttgagggagtcttgcaactgaatgtcaagttacatttattacaataaaatggacacttaatataatctgtaatgcattaacataatatgggaacttttaaagtattcagtctctgtattattgagtcctatttccacatttggccaggattctcaatatgatttaggcccaagacgtgggaagaaagaagtaaagaactaaaggatttttttcttcatttttttaattgaatatggggaaagatggaataagcttatctgtccagtaaaggccattatgtgtacatagggattattatttttcccccccttgggctgtactgatttcccagatgtaccacagcactcttagtagtgaagcacttgacttctagtgagtggattttttgtgtgtgtgttttatattgcagagtgaatacactctgtctgatactatgtgactttctgattatgtgatttttatgcattttatgtgttttgtaaactagctgtatttttggtccatgtctaggttgtagaattgaattgtgcattttggcatctgagcacagctgagttttctaaatcaatctctctccttgcacctagtttttgctttagatcactacctaagacttactgttgatttaatattagagcacttaagcatagctttgacttttatttcctttgatttttgtagattttcaggctgaagtacaataaggttctctgttctttactagtaattgcaaagattgtattctgtgaattttatttgtttaatacttttgatcttttgaagaggatgtaattatttaaggtattatgaaatgcattgtgatttgaattagatactctttggagatggagttttgctgttgttgcccaggctggagtgcaatggtgtgatctcggctcaccacagcctccgcctcctgggttcaagcaattctcttgccgcagcctcccaagtagctggaattacaggcatgcgccaccacgcccggctaattttatattttttttttcagtagagatggggggtttctccatgttggtcaggctggcctcgaactcttgacctcaggtaatctgcctgtctcagcctgctaaagtgctgagattacaggcatgagccactgcgcccggcctcagatactcttttaattagatgcgtttaaaaatttaacccaccattgctggcatgaatagatgtatttttagagtgattcataaatatcgtatacatgtttaaagttacaaactttttgcttatttcaaaatgcaggattcttttccatttaaaattccctctctttgtgagacttctttttgagtattctggttactctaaactgattggagatgaaattagatagaattgaaaactgtacttttaaaatgaaattttggggatgtcattaagcttgattttttaggttttttttttagtgtgtattataaattattttacactgattgtcagcgataaaatggaatgcctgggattttttaaaatttattttattcatttttataaggtaaaaacagtgttttgctaggcttaatttgaccatgttgtaaaatttattgtataccttgaaagaatcatttatgaaagatactgaattagctaatatatactctgtcttatgtagtttttgattaacaatacactttttaaatcattagctcatttgattttgcaaagaagaacaggtaacctaagaggcagacagaacaggcattacttttatttttctttcttttttattttatttatttatttatttatttattttttgcagcttaggaattgtagctccagtggaatcagtatcttgttaatggctagtgaaagactgagtctgaagaaggatgcaggacttttttggcacttggtgcagtatttttcccattatgttacatgagtggttcttaaacttcagtgtgttagaacaacctgaagggcttattaagctatggattgcttactccaccctcagagtttctgattcagtaggtctggattgggacctgagaatttttatttcttagaagttttcaagtgatgctgatgctggtgctctggggatcacactttgaggaccaccaatgaacattatctcccaccaagcaaacccttaacatgttatactcctttaggttattagaatttatacatgcattatttcatttgacctgtaaactctaagtaactttgcatggaaaatgttatcctgattttatagacgagatagtgagtttagaaaggcagtatggtggaatggagcatagatttggagttggctagacctaaagtccagattaaatctctgctcaaggctgggcgtggtggctcatgcctgtaatcccagtgctttgggaggccagcgttggcagattgcttgagtctggaagttcgagaccagtctgggcaacataggcagaccctgtctctacaaaaaaaaatacaaaaattagtcgggtgttatagtgcgcattggtagtcccagctactgaggaggctgaggtgggatcacctgagactgggactttgaggctgcattgagctgtgattgggacactgtactcctgcctgggtgacagagtgagaccctctctcaaaaataaataaataaatacatccccgctcagccacttatcagttacgtagatacactgcctaaccttagtgaaccctgtttcgacaactccaaaatgggagtaaaaatcctaaacttgtacagtggttttttagttttgttaaaagtacaggtgaggtttttttcagagtattggttgccatctgagagtgatcccctttcacctcctctaggacttttagcattttctggagacattttggtggtcacagctggggtggtagagtgtgctattggctaggggcttgaagccagtgatgctgcttaacatcctatatggcacaagacccctccccatcaacaaagaattatctagcccaaaatgctgtgtaaaatgtctggtatataataagtataatatttgatgaaaatcagtacctttgcccccaggtgtgatatttaagaaggtcaacttactaaatcagtgatggagttagtcctaacatctgggtgttctgactgctgctaggccagtattctttatatgataataagaactttgtccacagaagatatccctaataacaaaaaaggtttatttgaagaggactcatgtgttctttggctgattgtgaaagtgttgctttgaacttctgttagaaaaggttgaagatgttttccgtaagtgtttttaatactgtacgtagtattcagaaggatgtttaattttttttttaattttgctagtagtttttaaagtaatcctttttcctttaattatgtagttgttgaactgttgggagttacttttctcttactattttgttatttaatgtattctttgaccttatgcttttttattctaaagctgcttttattatagtcagatatgatgaagttaaatgtacaatgtaaaattgcaaatttccaacgagctatacaaacttaaatatttctaagtaaagaaaatagggctgactctaaggttctttgatccatgtgttgcattcttttctaggccctaaatttgctatgccagcctgttgaattaaagtgctttatttatctaaattagaaacttgtattaaagtgaagttttagaaaaaaagaaacaaaatcggaatggagttttaggttagcccagagatgggaagatgccaagaaggtagctttagtggattctgaattttttggttttgttttgtttttagggcaggcaaatgtaattacaaaagggttctaggaatagattgctgtgattttttttctgtttgcatgattttacagtttgctttgcctctcacttttgaatgcagaataaaatgtcaaggccttatttttttttaaattcttaagaaatttaagatttgactgttaattccttttgaaatatgggatattttgagataccaattatttaagacaaataggactcattgttacaattcagttgaataaggcttatgatgtttatttcagtatatgaatgaaaactatgtgcttattgtacttaagaaaatttcttttattaaaaacatgactaaagagaattttaaaaatcacccactgtcctacttctctaaaacttaatgttttcatattagcttccagttttgttcatatgcatatactttaaaacctagttcatggtgaacttaagagggtgttctttttaaaaaacaatttccattgcactttgtcgttgccttaattaaatggtgaaatcatcagaaatatttattttcctatacttatacatttattaagcttgtttccatttttttattttgtgattttttaagtggatttaagataacctaaacattagagaggattttcatggttttgattcatgaaatcataatgttatacaaacctaactgaagtgttagagccttgaagatttttcccccgaattacatatagtaactctacttgtatttaatactgaaagcatattttacttatttaagtgagacaaagtaaaatttagctgaatactttagatctatcatttccttttcctgttgtaagaacattacattgtgttgaaattaaagtggatatagaaggtaattagaataaactgccacatcatttttatagtaaagtggtaataacactattgctttctgtttttttaatcagaaggagtatgggcttataatgatgttactgttccctgaagcatattttgaatgatacggtttatatttgcacagttgcccaggtaatcattgtgatattaattgatcaatttgctatttatttgcgttttaaatcagtactagtatttgtgcttaaaaattttgcatatgttttatcagatttaatttttaagtgtcagatactaaaacaaataaccttaactttattaaattataattttttatcatgaggtggtattcatttattcatatagttagaacaaaaaatatttaaaatattgaggtagaaacaaattagtctctttttaattaaaagccagattacttgttagagtaacattttcccaaatgaggtaaaattgttgcgactgttaaacttaaggaaattttgatctaggtgtggtatataccttcttgtggggtgctaatgaaaacagggatggcaaaaatattttgtttgtgagtgtatgcatttatgctttttgacaacctaagaaacactcttacatctgagtatctttcatggactagctgtaggaaatctatataaaatagcttagtatactgaaagtatgacatagttttacatatctagattgtggttgtgattatatataatactataaaatatgctaacgtgctgcttaataatactatttggattttttttaatactgaaaaggtcacacagattgtgattattgtgtagtgtccaagaactaaggcctaccatctgttactcaaatgtatgaaaaagttaagataatttagtgatataagtggttttgacaccactgtttttggaataatctaattatgatttttataaagactaatatcaaattttaaacgtttgcaaaaatgaaacctaatagttatactgttatttatatttttctattacaatacagatactggctgagaactaaagattgtgtaataaacgcctggccttcagtcatttggttttttttttccctcgattgtttggatagttaactggacatcatgttttaacttgagaaattaagttatacaagattttgatattttaaactagttttcctaactggttgagatatataagaatttagtattacaggactcaatcagggaactgatttaataagaatttcttaaaaatttgtttaaatatttttcaagttcttttcttcatcttctacaacttaattcttgtctgtatgcaaatgagcttccccatttaaaattttgctgttgcattttaggccactatagaagttgtttctttaattttcactcacaagaatttggtcttaccaaattgtgtaaatctttaaaattgtgtatttggcttaatattatagaatctgattgatttaatctaccttgtttcatttagtatgttgacattttcttgagaaatttgttatgccaaatgattaacataataatattttaagtttagatatgattttgaatttacattttcaaatgcaactttgtgtctgtggccttttttttttttttttttttacgagaaacatcttgccaattttcagattaatctgtgaggaaagtagattggtttactagactcagtttgtagactttggtgagaactgaattggaggctatgaaaaaaataccttttgggcctttctgaatagacatatatacataaattatatctcttacattaagtgaggcacatatgtaggtgagatttttacctgaatattaaaagtttaaaagtcgttacctattctgtttacttaatagtatttaaagggtgtgagaggtgttatgtgtttctgtcccttgtttttattcctatccctcccatctaactgttggtactcttatcttcccaggtattaaacttgtatgttttaaaagcttatttacttgttgaaatggttaacttaattagttttttctttgaagtttcagcctaaatattttctgtttttttatatgtcctttaaatatgaaaattctacagctaatcataattagtaattgtactttttcccctattacaataactggtttcataataaaatggtatcccttcaataacaagcatttatagtagtttattaaaactaagggtgttatctattcaaaccaagcaatgcagacttactgttgactctgttaatatattttaaaattgcatattactaaaatttaaaatatgattttgactagtattttggtgtatgttattttagatattttgattatgcactacttaagaatgaattgtcaagtatgattataaagttgatataatagttaaccttcagtgggaataggaatcatttaatattgttagatatttgtattattagaacaatctcctatgattcttactaatatagtaatgaatgacagacaatatgttggctttcatatttaaaaattcacatgcatttctagtttatgtttttcttcgactaaaattctgcagcacttaggcaaagctatttttaccagttggaaaaaaagtaagtcatttccaaccaattttcctggcttgtagtatagaataaagagacttgattttattacattaaagccaaatataaaatgatgcaatctagcacacacttgtttggaacttttctcttttaaatattcagattaagaggacgttgaaaggtaaatttttttttttttttgagacggagtctagctctgtcacccaggctggagtgcactggcacgatttcggcttactgcaagctctgcctcccaggttcatgccattctcctgcctcagcctcccgagtagctgggactacaggcgcctaccacggtggcgcccggctaattttttgtatttttagtagagacggggtttcaccgtgttagccaggatggtctcgatctcctgacctcgtgatctgcctgcctcggcctcccaaagtgctgggattacaggtaaattttgattgttattagcaactataaaagttttgcagttggcttattggaaaaagaaaacctccttgccggagacggagacgcatttgtattagaactttgttttctgagtaccttacctatagtaggtttcaaatattggtgaattagttgatggttaggtctgcataattactgcgtatggaaattctggaaccctattttttcaaaatgcagctaatgttgagagaatatgcactaaatattactagatctttgtttttcaagatgctgatatcccttaacatcttctgcactttacctgtttgaatatcttttttgctgtaaaaattagtggccttatgtctttctgcataattatagagtagccaaaacctgttttaggttaatcacctctggcaaaataaatgataaaagcatagcttttgtaagcagaatgatattacagaagttaacttataaatctaagtgtattaaagacacttaggaaatttatgataatgctgggtcagcattacagttttaactttttacagtttttcatatgctttttttgtgattttgctgtagaaaattaacagttggcatttggcttagttcaagtataatgctgttgacaagtatatctgacacgtcattgaactaataatatttttgaaagctgataggtaagttatatctattttgtttcattcgtcattagtgatcggtcttagatgtttttagcgagagcaaaactgtagaggaatgtgtgtctgtgtgtgtatatgtgtgtgtgtgtgtgtgtattttaacagcaggagagttctgaaacaggaaaccagtcttatcatattcatccagagacctaggaagaaggtaattgtttggtatactcgttaaaaccagttggttgggcaacttaaatttttagaggatcacagatgtaggcttgagcagttgtagatagatgatttctttttttttctttcttttttcttttttttttgagatagagtctctctctgtcatccaggctggagtgcggtggcgcgatcttggcttactgcaacctctgcctcccaggttcaggcgtttctcctgtctcagcctcctgagtagctgggattacaggcgcatgctgccatgcccggctaattttttgtattttagtagagacggggtttcaccgtgttccccaggctggtctcgaactcctgagctcaggcaatctacccacctcggcctcccaaagtgctgggattacaggcgtgagccaccgtgtctggcgatagattatttcataattaacacctgctatgaagaaaaattgattaaaatagttgagaagtctagtacactctcagctaatatactaaattatactatggattttagagtattgttaacattatcagtgacttgatatcttcctgaggttctaatttgcttaactttaaataattggggttcagatcaccttgattgttcccttaaagattaaattttgtaaaactgtgtgtaattttcctgtatctggtttggatagctttaaaaatggttcttaagtttaatgagttcaactgggaaaaaagttagttctattttagatgttgtgtcactggaaattatgtttccctgtttgttatatgcacattattacaaagttgtaatcaatgttttcatactgttctctggtctgtttttttcacaaatacactttttatttgtcgccaggtacttatttttaaagctatagaggtaatatttcatcaggtgagggtaactaccatggtttgtttgctatactgtgttagggttattttcgttttttttttcttttataaactatagttgtgaatatgtttatgtagtttacttttggtttattagaatatattgctagagtgggattacaggattaaagagtgtacagtattttagttttttttttttttttacaagttgcagatttgttgccaaatgaacgagtttgtagtattgctaacaaggagaagaattactagcaagtcttgatgttacttttgaagagtgtgatgattgcatttaggaagatatctaaacttctgtttcaaagcaaaaagtatgtgcaaatttcttactcatgacaaattcatataatataaaaacatgaaagttgtgaggtcaggttgtttggagaagtagaaaacttcagtagagtttatagataggcagtcttcctttctggtttggcactgacagcagattaactagaaagtgttagaaggaacctaaaatttatactaaagtcaatttaagttaattaatataccagaattccttcttttacaatttatttataaaaacaccatattgagttgccttgtaatgagacatttaaactaaatttaaataacagaattcatgcaccatctaataacaaccccttatttacaattatagagtcctttgcaattttatagatattttcatgtatcccatttggtccttgaaacaattaatgaagaagttacagcaagtggtattatcattattttacagaagaacaaaacaaaaatatatgtggcccagagattgagtgatttacctgaggttataggctttagattgcatagctggaagtagaaccttgttcttctatattaaatgacaatattcattaagtacttagcacaggatttggtacctagtaaatatttaaatgttcctgtgttattcctgactattccttctttattcttaaaacgccattttttgagcactcttaatatttatagttcaaactttgtacctatgtacctttttctctttagaaaataagatttcaggctgcattaatttgatctgtacaggaatgattatatgttttacatattgggacaaattgctctttttttatataccttaagctctagggtacatgtgcacaacatacagatttgttacatatgtatacatgtgccatgttagtgtgctgcacccattaactcatcacttacattaggtatatctcctaatgctatccctcccccctccccataccccatgacaggccctggtgtgtgatgttccccaccctgtgtccaagtgttctcattgttcagttcccacctatgagtgagaacacgcggtgtttggttttctgtccttgcgatagtttgctcagaatgatggtttctagcttcatccatgtccctaccaaggacatgaagctcatccttttttatggctgcatagtattccatggtgtctatgtgtcacattttcttaatccagtctatcattgatggacatttgggttggttccaagtctttgctattgtgaatagtgctgcagtaaacatacatgtgcatgtgtctttatagcagcatgatttatactcctttgggtatatacccagtaatgggattgctgggtcaaatggtatttctagttctagatcactgaggaattgccacactgacttgaactagtttacagtcccaccaacagtgtaaaagtgttcctgtttctccacatcctctccagcacctgttgtttcctgactttttaatgatcactattctaactggtgtgagatggtatctcattgtggttttgatttgcatttctctgatggccagtgatgatgagcattttttcatgtgtctgttcgctgcataaatgtattcttttgagtagtgtctgttcatatccttcgcccactttttgatggggttgtttgattttttcttggaagtttgtttaagttctttgtagattctggatattagccctttgtcagatgggtagattgtaaaagttttctcccattctctaggttgcctgttcactctcatggtagtttcttttgctgtgcagaagctctttaggacaaattgttcttaaataatgaacagttggcactttttcaactggaaaattcaaggaactgctctttctgctttctgctcaatatgaatcttcaatttagaaatgagagtccatcattaacaattcaacatagcttattaataggaaaaaaaaacctagtaacaaatgtaaaatctttgattaaatgagaaagtcatagaagttcatcagatttgtatttaaagcatgatttcattagaaaagttgataataaggatttaactgtgacataattggaaaatacttgtttaaacttaaaattttgaaaagaaatgtaaatgtgatgtaacttatgaatcagtggttgagtttcttttttgctcacaagaaccctaactgtgtgttacttgaaagcactgatggaaatcagggaaaaagctccagaagttcctacgaaataaaattaaatgataaagtcctggtatctgctaacttgccttccattcctgttatcttttcttcttagtctgacttcattaattctttcaccctggctactggtttagctcagtgttttatgagccaggcagcttcagactttgcttttgatgctctttgttcattacctctaaagctgtattatcactttcattttatcattaatgtttcatgtatatgttatagtttcatattgttactgcaacttttacttagctataatttaaaaaatatctgtgatctgtggaaataattattctatggcagaaaagtagttattgcattttactttataagttgtttaaggataagcatacctatatattaagcactacaaagaaacttttacaatggctttatttttagcaaaccatcatagttaaaataagatttagtgtacatgtcaggaacacagtcttatgaaataaggtttagggagctatttttagttactatatcctacttgaaaattgtagttaaatttctagcatataccctattaatttagatgcaagtacagatttgagataaggtagatacattatttggatgtcaactcggaagttgttcaagaaaagatattttgttatttagatgtaacttggaacatatttctagtgtttcaagtcatgattgtatgcctagaacaggcaataaaaatttacttagctggtaaaacagccacattatttcaaatatagtttagttatattatggattaaattgatttttgtggacagactttagaacttaattgctattaattacattttttctttgggacggtatttgttctttggtgagaaaggattcttgtaacacctaaatcaagactgtccaaacatggcatatgcagtttaccagtcaaaacaaactaatcacttaagatctgtgtattttgttttatttgaattatacctcaattaaaacaaatttagcatgtttacacaaaggtggggggaaactgtctaatatatctgagatctgttggagctggggtgaccatccaacttaggcaagatagctagtaccatgtatgcatttcttttacctttcttattgtatatacagtaatcactgatattatgagaaaaagaactttttaataattcaggagatattttatcgctagtatatattgagtgcttattatgtgccttatatactttggactcatttaatcctcaacacaacaaccctatgtagttcatactagaattattcccatttaaagatggggaaagtgatgtttagagaggctaagtgacttgcccatggccaaagtattagaactgggatttgaacacaggtagcctgattcctaaataaatgaccactaacattaaaaagacataaacatagaggtgtttgttgcaatgttagtcataatacctaaaaattgtgaactagttaaatgtccaatagtagtaaaatggttcattaaccatggtacacccatcaatataatgttatattgtcatttaaaattgtattcccaagtttcgtatcaggaaaatataataaatttttgaaaaatgtaatgggatatattgtatttataatacagtaatcactatgtaaccaacatttttatttccatcaaaaattagttataaagaaatagaaatctaagaagtttaatagatattaccattgaacactagatttgtattagtatcttttatatttatctctctcatttcctatattggccatgtttacttttaaaatagtaaaagtcataagctctattttaaaaataaatgttagtttattaacccaagaataatagctaactataaattcatatttgataaaataaaaagatgacattcatcataagggatacatacctgtgctagcatatggcatttttaaaatcacatgagtaatttgtaatcatcatagaaatattagaaaatacaaataagcaaacacatactgaaaatttagtgttcccaaatctaaaacagagacactgtttttttcttttgggattgtattttagatatgttcttaagttataataaagtaaatacttaaaaggcaaattgatacattaaggatttcaaagagtaaaactttttgttaagctttgatgttctttagaaagtttagattattccacaagtcactgtcgttgaaagaaaagtagttacagtggggtcttatgggataaggcattaccatttgttcagttgagagacagctatcactatgttttaagcattgttcatatattagctcatttaatcctcatagcaaccttatatgataggtacctttattagccccattctgcttaggaagcaacagaaagagtatgtattttgcctaaggttgcacaataagttaagctggggttccaattctagcaagttggttctagagtgtatgttattaaccattatgccgtagtgcctgcaagtagatctctagatgtcagaaatactcatcttcctctggttacctggttgttataaatctttatgcttaatacttatgtcattatatgtaaatttcgtattaaacactcaacttattcagaagaatatcaggtaagtgtaggttaaggctgttttctatcagaaatcattatatgtatatatattcctcagttcttatgttgtttagtttttctaaaatgtcaaattttataatatatggagaagtataaatgtatattagaaagattttgtttatttgtgtaatttgtggcataagaaatatttgcctcaagatttggtgcttgtttaggtagttgctggcattacttttggaaatgtcagtaaattttcatactgtcttggaattttttcaatttttacattttattagtaaatgtaattacaggttagtaaatcacttatttgaacctgtttcctttgaaagttttatatttttatttggaaatagaaaaaccttaatttcctctcgttgggcagtatggtgtcaaaagcttgggctttggagcttcgtatataatctgggttcaaattataacttactagttactaacttgggcaaattacccagtctttttgactctcaatttctttgtctatgaaatgtaatactatttaggattgttaggattaaatgagaatatatttggcatactgtctggtacatgatacttaacaggtactagttgtctacatctttctaacttaggatggatgccgatgtcttgggtaacatctcaaactttatcagtaaggaaggtgagaatctgaagaaaatgaaaccttaaaaagattgaattcctggactccatttaaaggagtaaatagctcacgaacaagacttgctgctctgcaaagtcttccatgttgatcctggtctttgactccttatctgtctgattaaattgaattcgctgccgtggcatccttaaagctggaccttactttgtcagtcctgccttctccatgttgctttgtgtgtaagcttcactggactgtttgctttttgctgattattttatgtatttccatatgtctactttagcctttgcttggaatgttctaactgctcttgtttcttcctctgtttactggtttctgacttaactcttaaggattatctaatatattacctacttggtgaaggtttatctgtgtccccacagaattaatccttccctctttaactcttaagctatcttattttttatctaatcgggtctttggcacaattataggtctgtgtgtctgtcttccctaatagaataggaaagccttgaggacagtagtctttgcttacttagccttatattctcagtgccccttgtgcaaaacgttcaatatatgtttgaatgattatgtgaatgaaggagggggccagctgaatttactttaatgattatgtaacacccatttatgtatagttatagacttgtctgaaatgagttaaatcctttgcaacgtttgctgctatgctttgaatgtctcttacaaaactcatgttgaaatttaattgccattgtaatggtattaagagatggaacctttaagaggtgattagataatggtatctctatccttatgaatggattaatgctgtttgaatggtagtggatgagttatcttgggagtttggcctcctccgtctcacatgcttccttaccttctgccatgtggtaactcaacacaaagatccttgccagatgctgatgccatgctcttggacttcccagtctccagaaccgtgagccaaatacatttctgttcattctaaactacctgttttgtggtattctagtaaagcaacataaaatttactaagaaaactggtaccaagagtgtgattgttgccataacaaatacctgaaaatgttcaaatggcttgggttctggctagagaaggatggaagagtttggatgaacaggctagaaaaagcctgtattgctgagaatagagcattaaggacaattctgatgaggattcagaagaagagagctgtagggaaaatctggaacttcttagagagttgtcatcagttggtagaactataagtggtaaaggtctttctgatgatatctcagaaatgaagaacaagatactggacactggagtaaaggccatccttgttaaatagttgcaaagaacttggcgaaattatgttcatatcctaagactttatggaatgcagaatttaagagtgatgaactaggatatgctgcagaagaaataactcagcagcagagcatttaggttactggatggctacttttaaccacttaaactaagctgggggaagggaatgacttgaagacagaatttataattaaaagagaggcagaatggaaatacttggaaaatttgcagcctggccatagtaaagaatgcaaaaggtatgtttaggagagcaaaccaagggtgtggtccaggaaccatttgctgaagagattaatattcctagaggagacccaagggctatttatcaagacagtggaaaaagaccccagaggcattttggagatctttgaggctgcctgccccatcacaggcccagagctctaggagggcagaatggtttgtggctcaggtggtccttcacaagcttgctgcccagggctacctcagctccccatatttcaacccagtgggccttggctgtcctaggtctggttcagaggggcccaggtgtggcttaggctactgctgagtactcaaatggtaaaccttggcagcgtctatatggtgctaattctgcaggctcacaggatgaaagagctgtgggagacatggctaccaccaccaggatttcaaaggatgatggggatagtctgggagagacttgccacaggcttggagcctctgaagggtggaaatgtgggttggagtcactacagagagtccctactagggcattgcataatggagccatggcagcaggcccaccaccaaagcttcagaactgtagagctacaagtatacagtgccagcctgggagaacttcaggcttgagaccctaacctgtgaaagctgcatgggctaagtacagcaaagccatggaggtggggcttcccagggtctattgggatgaaacgaatgtattttgtaggtgagaaggacatgagttttgaggcccaggggcagaatgctatggtttggttgtttccttcaaaactcatgttgaaacttcattgccatgtggcattattatgaggtggaacctttcagaagtggttacattataagggctttgccttcattaatggattaatgccattattgcaggtgtgggttagttatctctggagtttggccccctttttctctatcatgtgctcatgccctcttttgccatgtgatgccttctaccatgttatgatgcatccagaagactctcaccacatgcagccccttgatcttagacttctcagcttctagaactgtgagtgaaataaacttcttttctttataaattaccccgtctgtggtattgtatagcagcagaaaatagacatcagcctgaagttcccccaggctggcattaaatactaattattaattagtatttatagtgcaaggataaattcaagtttagccctggttagaatgaccacatttcaagggaggggctttgtacttctgtgcatatctgtaaggataaaaatcttaatactattctcactgaaattaatggtttaggttaggtaaggttgttagtgctaataattatttcttttaataaaatattcttagttgcgttgttcaaaaaacatagatgatttgaatttatattttttggccaaaatatatttataattttgagtaggaattccagagtattggtagctataaccactttgggttccctgccattgcttctggtgcctcattttttctgacgtcttccattttcttacatttgtcttctaaggtggagttaagattactcagttaagattatttcactttaggcctctgctgtcttctgcttttttttttaaaatgaatggatataatatcccaatacattttgataattgaacaacagctacatttttaagtgaggctactttcttctaattttttaaatttatttttctcagtttttaaaaaaaatgtcagattggctaagagttggggcagctttcttatgtgagagtagtagatgacagcaaatatttgtgatgttaaaatgataatcctaatagttttcttttagaatctttataataaaaaccctttgaggctgagggtgaatttgtatgttcctaaagtgacaaaaaatgttcttggggcatagtaatttaaatcttagatgcttttattagtataattttttggtagaaatttggcattaaaaaatgcatacagagctttttctacatacagggcaagacagcattttgtcatggcaattagtaaatagataattataaaacatctaattttaagcaatttgttacagaaacgatacaggtacattgtggcaaaaatagaagatacaaaacaagcaaatatgagaaaaaatatacatgccaccacctatatatgacttttagtactttataatcttttgtctatatatgtctatatggatatatacgtattctttttatccaaatggtattacattgtacattctgttttgaaacctgccttttttagtcatttacatctacttttccatctcagtaacttttcatcttgtgtaatgcccggatcacattaaaatgtttccaattagctcaaaaatgtcctttatggctggtttggctaaaacagtatccaggccagcattgcacctatgaaattggctgttaggaatcttgtatctttaaaaatcaagggcagcaacccatcctcccgcttcccccacctcccaccacccccccaccttttttttttcttaaagatactggcttgttgaagagagaatgggtcatgtcctacaaactgtctgaatttgtccagtttgctgtctcatagtgtcatttagcttgttttatcctatgtatttcctgcaaattaaaatttgtatctgaatccttggtggatttgagttgaagatccttaaccatcatagatgatgctgtgtcctttatattgcatgtcagaagttacatgatctttacttgattcatgatgaggagatggccactgaaattggacagtgacagtcttttctgcccattgttcaattatattcgtctctttacattagaaagtattttgggtagtagtattttggtgctgtaagaaagttcattttctcatcaaccactcacctattggtttaacaccatttgttgatctttgagtatatcagtaatttcatcagggtttgcaaaataagactttaaattctattgttttacattattaattgatgttttttgataaggtagaacttgtgaaatgggactatttgtttgtctttaaatacagtctctataggaaagacaaaataaatacttaaatctcactctttaccatttttcaaagtgaagaactattccgttaaccacctcaaaagatgataaataaaaagggtatttttagttgtttcaactttttttttttttttgagatggggtcttactctgttgcccaggctggtgtgctgtggtgcaatcatggtacaccgaagcctcagtctccctgggctcagatgattctcccacctcagcctgggactaaaggtgtacaccaccatggccagccaatttttttgtattttttgtagagatggggttttgccatattgcccagcctagcctcaaactcctgggctgaaggaatccacccatctcagcctcccaaagtgctaggattacagacgtgaccaacaatatccggccttaacttttttcttttgagtgtctttatagactcaaggacttttatttaattcagggtgttagtaccatttaaatgttttctttgatgctcagattatcacagctagtcatttggacctttataccacctcctatgtccatttgatataggccattaatctctataagccttcctccttctcttggaatgaaaaggtatcctaggctcacctgtaccttccctactccagacctggcattaagtctttttccaaggagtttggtaccttttagtttattatgatattagagatgaaaatctgtgttctaggaatgtttattactgctagagtgatgttgcttttaggccatttcagagaaaagacctagaaaacagatttttacaaacatgaattcatactgatatttttagttttttacatgatttcttgattttacaatattatctgctttcttaacttaaaattatgaaccttaaagtcattagcataacttctttgcttatttctacaacataaagaaaatagtcctggtgcggtggctcacactgtaatcccagcactttgggagattgaggcaggtggattgcttgagctcaggagttcaagaccaacctgggcaacatgatgaaaccttgtctttacaaaaaattagctgggcatggtggcatgtgcttgtattcccagctactcaggaggctgaggtgggaggatcacctgagcccaggaggtcaaggctctagtgagccatgatcatgccaccacactccagcctgggtgacaaagtgagaccctgtttcagggggaaaaaaaagataaaatagtttgaggaggctggatgtagtggctcatgcatgtcatcctggcactttgggaggtcaaggtgggaggatggcttgagcccaggagtttgagaccagcctgtgccacatcatgagacctggtctctatttaaaaaaaaaaaaaaaagaaaatagtttgaggatatcaataatgatattactagaatcagtaaaactaccaaaagaagtttaaagtttcttcctagtgtttttttgttcttagaatacttcctaccaagaagtgcagtaaaagtgcagtgtccaaatagcccttgtaacaaaacctttctctttctcctgggtgccaatttgacatttaatcagttttgtttctagcagtgttcaatttattagattataagtcttttttttctttatattattctaagatcaaaaatatataaagatatacacaggagtcctgctgctacctgttcttgctatgcttttccccttttcttccctttctctgtgaagcagccatttttattagtttcttgtttatcactcatgcatgcatatgtttattgaggatgttgacattcaagcaaatatatgggttaacattctttttgtcatccctatacgaaagatatacccagtatactctattgggtgggtttttttccttaaaatattcagtagatctctccagttagcacatagttatcttatagatagaacatatacatataaccttttcttaaactatgctattaaaataatagctttcagtaacttgataattatttttggattgaaaatactactgaaatcaactcaatcatgtgaaagctgcagaaagaaaaagacctagaaaaagggcattggattaggtcaactttgaattttatttggaagataaatgagtccagaagtgagtgggcagagattattggagttggtcttgaaatgaggcgttaggcagattgactgggctggtgtgaaaggtctgtcagaaaatcatgagattagattgaggtacctcaaaaaatgagagctggtatgatgagtgggtaagaatcataaaagcgtagagtgttgatgatttttatagtttataaatggttcttgtgtgtagagttttgtttttatgctagctatagtctgtaacataattcactataatgggcatgctaaatatccatgacagttgacccttgaacaacacagagggtaggggcgcctacccctgtgcagttgaaaattcacatgtaacttttgactccccaaaacttaatatttagcctatacttgactagaagtcttactgatgacataatgttcgttaatacatattttatatatgtgtcagatagcatatttgtataataaagtaagctgcaggaaaaatattaaaatcataaagaagagaaaatatacttactattcattaagtggaagtggatcctcataaaggtcttcatcctcactgccttcactttgagtaggccgaggagtaggagagagaggaaaggtcagacttgctgtctcatgggtggcagaggtagaagaaggtccacatacaagtggtccgacacagctcaaaccggttttgttcattggccaactgtagtttgattgaaagtaataataaatgaagtttctgcctcagttcagtattatcaagtcatagatagcaagggctggaagaaaccttagtagtaatctctttgagtctaattatcatgtagaataggaaattgcggtctagaaaggttaagtgacttgtccaaattacacaactagttagagacatagccagctcttaaatctgacttccagattttcactgtgtcttcttttttctgtaacgtgttgccttttttagccatgaaaaattagaagttgaactcttgtcttttcaggcaggtgtcaattttggggttttgttttgatttttggtttttgacataaagtactttagttctgtgatgtataaaccgtgagtttctgtttttctcatatacctgaatactgtccatgtggaagttaccttttatctttaccagtattaacacataaatggttatacataaatacattgaccaccttttattactccagctatagtggggaaaactttcttttcataactagctaatgttttaaaaagtattcttttagtttgattgctgcatatttcagatatttctttccttaactaaagtactcagatatttatccaaacattattgctatgggatttcctgcagaaagacttgaaggcgtatacaggaacaatattgatgatgtagtaaggtaagaatgctttgattttctatttcaaatattgatgtttatattcatgttgtgttttcatttagaaaagatttctaagccacagaaaaagatactttgtgatgtaaactattattgtagtgctctataatcattttttggcttaccgtacctaatggacttcagggggatacagttcatttgataagaactgaccttatacattacataatcaggtacttatgtgatatcatttcctggactccataaaatgctggtcaccaggtttaatacctggattccattacagtgtgatttttgtcttatttcatagttggggattaggcttaaaatcctagagtggatttattcagttaaatttattcacactaagatgtagatgactaatactgtatatttttatgtagaccaaattttaaggtaccactgtgcatatgtataccaactacctgaagaagtatttggttggtacaagagatatagaaaggaatcgctgggtgtaccaaggctaatcagttttataattttgcataattttctaactgcgattatcatttagtttagaacaatttatttctcaaggcccatgtaaatattatttttaaaatatacagtcttaagaattcatggcatattttatgaaaggaggaattcatgtctgatgtgcaaatagtcttaacatattttctaatttcagagcaaaaatatatatgtatgaataaattaactgtaaattgtcagtaggaaccttaagaattcgtggcgtattttatgaaaggaattcatgtctgatgtgcaaatagtcttaacatatttgctaatttcagagcaaaaatatatgtgtattaataaatcaactgtaaattgtcagtaagaaccttaatggctttaaaagttaaaatttcaggtcaagcattgtggtgtgctcctgtagtcccagctacttgggaggctgaggtgggaggatcacttggcttgaacccccaggtagagggtagaggccagtctgggtaacacagcgagaacccatctcttaaaaaaaaagtttaagttgtggattatttcctttacactctttcattagtatctttcctggagactttcaatttaaatacttggtgcttatgacaattagatgttaaaatggatgggaaagtactttgtaacttataaagcattatgcagatgtagactccttttataatagttgtgtaagtatataagacaacctacattcttcatgagctagccataagttttagcaacttgctttgaaccacggtagatttacaattttctgtagtattgagttgtgttcatttagaattttgtaatatttatattgaaaatcaaatttttgtacctacaaaaactacaaaaaatccccctagtttttatagtttctattaaaattatagctggtacatagggatgccagaaggactgtttaagaagctgaaaatagagaaatgaatttatcttctcatagttaggcagggcacagtagaaggatgcttaacattgcaagctgatgggaacagcaggttgatatagcttgtgataacacttctaaagaaaaagcaatgagccatagaaaaaagaaaaagatacattttgaattaaggaagatggtgaatctgggaagtgagcagtacagtcaccagacgtgtatcctctcctatggtacagaagtgtttattgggtctctttatggcctgcatgatatatcccacaagatgacctacttcacattattttaattctgtattcaactaagcactaattcaacccagccagattagtactcataccaaaaaagagtgaatactctgaatagagggcaggttttctgattatggtgagaatatctttgtggtaaattaatctggtgtgctagtttttacgttggtctcttctcagtgtcgttagtcactgaggctgattgatcatcttttaggttactgataaagttcctgtacagctgattttcagaccttagattgcaataacttcaccaagaaaatacttcattgggaagcattttggtccttccatttgattcataactcttacctttatgcctctgaaggaaaagatttatacattcagcttgtaattagtaatcaagactgaggtttagtctatctagcttcacaatctatctagtttgttttgtctagccatatgatttcttcaaatatgccatttcttaaaaaaaaatgttttatgtatcccgattaatatttagccagtggttcttttagccgatggatcttgtcacctcttatgatactattaatagcatgtcaacatgaagaattatctgctgaatataatagctatgctgtccttgtttccttttgtctcattcttttttgattgggggataattggccaataaagctttgatagcctctattgcccaggcccctcctcttcttttatgagagaaaggatgaacagtgaccagaaataaaggtattgtttttttctatcaactaaaatggaaataaataattcctaagtaatttgcctgttaggattaaagtctccaagagaatggctgtgcctagtacctaagtgattaatttccttgattggttcacattatattgaggatattagtaatcagtagtgattccttttttggttcaaagatgatagtgtcacagtgaaaaatgtttttaaaatttttgtatacttaatttttctgttaacgaaagtattttcagttggatttttgtttgccctctctattagaatgcccaaagaatatttaaaattttccttttctcttatactgcatatttttcctgtgatttttccccaaacggaaaatactctgcagagattagactttgttattgttgtactacatcattgctttgactaaaataaactcagattgcaaataccttcaagcttacattgctcagtatttttttttttttttttttttgagacggagtctcactcttgtcgcccaggctggagtgcagtggtgccatctcagctcactgcaacctctgcctcctgggttcaagcgattctcctgcctcagcctgcggagcagctgggattatagatgcccgcccccacgcccagctgatttttgtatttgtagtagagatggggttttaccttgttggccagtctggtctcaaactcctgacctcgggtgatccatctgtctcggcctctggaattacaggtgtgagccgccacgcctggctaaattgatcagtattatttaactttgagggatatgatttgttatggaatgcgaagttttatacttgaggtactcagagtccttttgagacaaatatttaacttctccttttgaggttaccgcctacgattgggaattaatgtaaaaaataagccaaaagaaagtgagggaaaagtgaaccaagctgtaatttttttactcttttttattgttgttgttattgttgctgttttttactatcttgattgcaacagtttggcttatatatatagcatttggaattgacagtaagaaagccacatctcatagaagctaactattcccaaattgtttttttcttcttttcctcttactactgctgttttcctcctttcttgctgctaagctcttgtcctgacatgctggtaatatgaaacagtgttttattcagataattgattattctgtaatatgtatgttaatcttttttattacactttaagtaatagggtacatatgcacaacttacagattcgttacatatgtatacatgtgccgtgttggtttgctgcacccattaactcgtcatttacattaggtatttctcctaatgttatccctctcccaaccccccaccccaggacaggccccggtgtgtgatgttccccgccctgtgtccaagtgttctcgttgttcagttgccacctgtgagtgagaacatgcggtgtttggttttctgtccttgcgatagtttgctcagaatgatggtttccagcttcatctatgtccctacaaaggacgtgaagctcatccttttttatggctgcatactactccgtggtgtatatgtgccacattttcttaatccagtcagtcattgatggacatttgggttggttctaattctttgctattgtgaatagtgctgcagtaaacatacgtatgcatgtgtctttatagtagcatgatttataatcctttggatatatacccagtaatggaattgctgggtcaaatggtatttctagttctagatccctgaggaattgccacactgtcttccacaatggttgaactagtttacagtcccaccaacagtgtaaaaatgttcctgttcctccacatcctctccagcacctgttgtttcctgactttttaatgatcgccattctaactggtgtgagatggtatctcattgtggttttgatttgcatttctctgatggccagtgatgatgagcattttttcatgtgtctgttggctgcataaatgtctataaatgtcttcttttggaaagtgtctgttcatatcctttgcccactttttgatggggttgtttgatttttttcctgtaaatttgtttaagttctttgtagattctggatattagccatttgtcagatgggtagattgcagaaattttcttccattctataggttgcctgtccactctgatggtagtttcttttgctgtgcagaagctctttagtttaattagatcccatttgactattttggcttttgttgccattgcttttggtgttttagtcatgaagtccttgcccatgcctatgtcctgaatggtattgcctaggtttgcttctagggtttttatggttttaggtctacatttaagtctttaacatttaagtctttaatccatcttgaattaatttttgtataaggtgtaaggaaatgatccaatttcagctttctacatatgactagccagttttcccagcaccatttattaactagggaaccctttccccatttcctgtttttgtcaggtttgtcaaagatcagatggttgtagatgtgtcatgttatttctgagggctctgttctgttccattggtctatatctctgttttggtaccagtaccatgctgttttggttactgtagccttgtagtatagtttgaagtcaggtagtgtgatgcctccagcttttttctttctgcttaggattgtcttggcagtgcgggctcttttttggctccatatgaactttaaagtagttttttccaattctgtgaagaaatttattggtagcttgatggggatggcattgtttctataaattaccttgggcagtgtggccattttcacgatattgattcttcctacccatgagcatggaatgttcttccatttgtttgtgtcatcttttatttcgttgagcagtggtttgtagttcttgaacaggtccttcacatcccttgtaagttggattcctaggtattttattctctttgtagcagttgtgagtgggagttcactcatgatttggctctctgtctgtctgttattggtgtataagaatgcttgtgatttttgcacattgattttgtatcctgagactttgctgaagttgcttatcagctgaaggagattttgggctgagacagtggggctttctaaatatacaatcatgtcatctgcaaacagggacaatttgacttcctcttttcctaattgaataccctttatttctttctcttgcctgattgccctggccagaacttccaacactgtgttgaataggagtggtgagagagggcgtccctgtcttgtgccagttttcaaagggaatgcttccagtttttgcccattcagtatgatactggctgtgggtttgtcataaatagctcttattattttgagatacgttccatcaatacctaatttattgagagtttttagcatgaagggctgttgaattttgtcaaaggccttttctgcatctattgagataatcatgtggttttttgtctttggttctctttatgtgatggattatgtttattgatttgcgtatgttgaaccagccttgcatcacagggatgaagccaacttgatcttggtggataagctttttgatgtgctgctggattcggtttgccaatattttattgaggatttttgcattgatgttcatcaggggtgttggtctaaaattctctttttttgttgtgtctctgccaggctttggtatcgggatggtgctggcctcctaaaatgagttagggaggattccctctttttctatgaattggaatagtttcagaaggaatggtaccagctcgtctttttacctctggtagaattcggctgtgaatctgtctggtcctggacttttttcggttggtaggctattaattattgcctcaatttcagagcctgttactggtctattcagggattcaacttcttcctggtttagtcttgggagggtgtatatgtccaggaatttatccatttcttctagattttctagtttatttgcatagaggtgtttatagtattctctgatggtagtttgtatttctgtgggatcagtggtgatatcccctttatcattttttattgcatctatttgattcttctctcttttcttccttattagtcttgctagcagtctatcaattttgttttttaaaaaaaccagctcctggattcattgattttttttttgaagggttttttgtgtcctatctccttcaattctgctctgatcttagttatttcttgccttctgctagcttttgaatttgtttgctcttgcatctctagttgttttaattgtgatattagggtgttgattttagatctttcctgctttctcttgtgggcatttagtgctataaatttccctgtatacactgctttaaatgtgtcccagagattctggtacgttgtgtctttgttctcattggtttcaaagaacatctttatttctgccttcattttgttatttacccagtagtcattcaggagcaggttgatcagtttccatgtagttgtgcagttttgagtgagtttcttaatcctgagttctaatttgattttactgtggtctgagagacagtttgttgtgatttttattcttttacatttgctgaggagtgagtgctttacttccaactatgtggtcaattttggaataagtgtgatgtggtgctgataagaatgtatattctgttgatttgggatggagagttctgtagatgtctattaggtctgcttggtgcagagctgagttcaaatcctggatatccttgttaaccttctgtctcgttgatctgtctcatattgacagtggggtgttaaaatctcccgatattaactgtgtgggagtctaagtctctttgtaggtcactcaggacttgctttatgaatctaggtgctcctgtattgggtgtatatatatttaggatagttagctcttcttgttgaattgatccctttaccattatgtaatgcccttctttgtctcttttgatctttgttggtttacagtttgttttattagagactaggattgcaacccctgctttttcttgctttccatttgcttggtagatcttcctccatccctttattttgagcctgtgtgtgtgtctgcatgtgagatacatctcctgaatacagcacactgatgggtcttgactctttatccaatttgccagtctttgtcttttaattggggcatttaccccatttacatttaaggttaatattgttatgtgtgaatttgatcctgtcattgtgatgttagctggttattttgcccattagttgatgtagtttcttcctagcatcaatggtctttacaatttggcatgtttttgcagtggctgataccagttgttcctttccatgtttagtgcttccttcaggagctcttgtaaggcaggcctggtagtgacaaaatctctcagcatttgcttgtctgtaaaggtttttatttctccttcccttatgaagcttagtttggctggatatgaaattctgggttgaaaattcttttctttaagaatgtagactattggcccccactctcttctggcttgtagagtttcagcggagagatctgctgttagtctgatgggcttccctttgtgggtaacccgacctttctctctggctgccctttacattttttcctgcatttccaccttggtgaatctaacaattatgtgtcttggggttgctcttctctaggagtatctttgtggtggtctctgtattccctgaatttgaatgttggcgtgccttgctatgttggggaagttctcctggataatatcctgaagagtgttttccagcttggttccattctccccgtcactgtcaagtacaccaatcaaacgtagatttggtcttttcacatagtcccatatttcttggaggctttgttcatttctttttactgttttttctctaaacttctcttcttgcttcatttcattcatttgatctgcaattactgataccctttcttccacttgatcgaatcggctgctgaagcttgtgcatgcgtcatgtagttctcgagccatgattttcagctccatcaggtcatttatggtcttctgtacactgtttattctagttagccatttgtctaatcttttttcaagatttttagcttccttgcgatgggtttgaacatcctcctttagctcggagaagtttgttactactgaccttctgaagcctacttctgtcaactcgtcaaagtcattcttcatccagctttgttccattgctggtgaggagctgtgatcctttggaggagaagaggcactctgggttttagaattttcagcttttctgctctgttttctccccatctttgtggttttatctacctttggtctttgattatggtgacctacagatggggttttggtgtggatgtcctttttgttaatgttgatgctattcctttctgtttgttagttttccttctaacagtcaggtccctcagctgtaggtctgttggagtttgctggaggtccactccagacactgtctggatatcaccagtggaggctgcagaacagcaaatattgcagaacagcaaatattgctgccggagccttcctctggaagcttcgtcttgggggcacccggctgtatgaggtgtcagtcggcccctactgggaggtgtctcccagttaggctacaagggggtcagggacccacttgaggaggcagtctgtccgttctcagagctcaaacactgtgctggtagaactactgctctcttcagagctgtcagagagggatgtttaagtctgaggaagtttctgctgccttttgttcagctatgccctgcctccagaggtggagtctacagaggcaggcaggcctccttgagctgtggtgggctccacccagttggagcttcccaaccactttacctactcaagcctcagcaatgatggacgcccctcccccagccaggctgctgccttgaagttcaatttggaactgctacgctagcagtgagcaaggctctgtgggcgtaggacctgctgagccaggcacgggatataatctcctgttgtgccatttgctaagaccgttggaaaagcgcagtatttgggtggcagtgtcccaattttcccggtatagtgtgtcacagcttcccttggcttggaaagggacatcccccgaccccttgtgcttcctgggtgaggcaatgccccgccctgcttcagctcaccctccgtgggctgcacccactttccaaccagtcccagtgagaagaaccaggtacctcagttggaaatgcagaaatcacctgtcttccgcgtggatcatgctgggagctgcagacaggagctgttcctatttgaccatcttggaatgccacctttttttttttttttttttttttaaggcagtttcttgctctgtcacccaggctggggtgcagaggcatgatcacggctcactgcaacctctgccttctgggctcaagtgatcctcccacctcagcctcccaagttgctgggaccacagccacgcatcaccaggcctggctaatttttgtgttttttgtagagatagggtttcgctgtgtttcccaggctggtctcaaactcctgcgctcaagcgatccgcctgcctcagcctcccaaagtgctgggattacaggcatgagccactgcacccggccaatatgtatgttaatctcatccctcaagctgatactgaagtttttcaatttatgttatttggtgtaaatctaggcagtctttaacaaaattggtgcttcatgtgtttaagaggcataacttaagaattgtttgtttcttataaatcaggagaatggaggtttaatagaggtgaactgtctttctcactgcagaacctttaatatgccactatgcattgtaaatctcccaagagtgagattctagtatgatgcttttcttttccttttctgttctttccctttccctctacctcctttttcttttctttgttggtggcatgagtcctatattataaggaaatgcttttagagtacagtcttctgatatatagtgatttttgaaaaagatttatttattgtcttgttcactgtgagctttttcccccatgtataagcagctgtgtaatagattcaagagcaccccctcgcccctttttttttgagacagagtctcgctcggtcactcaggctggagtacggtggtgctgtgatcatggttcacctcgacttctgggctccagcgatcctcccacctcatcctctcaagtagctgggaccacaggcgtgtgtcaccgtacatggctaatttttctatttttagtagaggcagagtttcgccatgttttccaggctggtctcgaactcctgaactcaagcagtccacctgtctcagcctcccaaagtgctgggattacaggcgtgagcctccactcccagtctcaaatattcttttgaaatatttgaaatatgttgatctctcagtctttcaaccttagttgtatgttgattttcaataaaaaggaagtatttgttgccctaacatcagtattggctattcagtttaaaaaaggagttaaagagatgttatttataggcaggcttcaaaagaggaaagaatgatcagtttcattctctgtttctagcatattctgactccttctctcatattacctcgtttttcccacattttttctttaataaagtgaaattcacataacagctaaccattttaaccacggaaagtgtacattccgtggcatttattaccttcacagtgttacctctacctttatcaagtttcaaaacattttatcaccccaaaagaaagccctgttcttattgggtgcctcttgcttttttttttttttttttttttaaatcttgagacggggtcttggtttgtttcccaggttgtagtgcaatggggcgatctcatctcattgcaacctctgcctcccgagttcaagcaattctcctgcctcagcctcccgtagctgggactacaggcacgcgccacatgcctggctaatttttgtatttttagtagaaacgtggtttcaccatgttggccaggctagccttgaactcctgaccttaggtaatctgcctgccttggcctcccaaagtgctgggattataggcgtgagccaccgttctggccacctcctacttctttcattagtcttaattccttagtggatttgacagtgtttatattatctacaccaatgcatttttttgtatgttaataataggagatatttattgggcatttatttacatacttatttgcatgtgtaactgttgtatagccagtttatgtatataatcttactaaatctctacagtaaatctatccccatttcatagatggtttaaaagaagttaacttccccaagcattacttttagtaagtagtgagactgaaggttgagttctggtctgtcagattccgaagttgtttccttaggaaccatattatcttgtgtacaactcttgggctaatcttgttaatattctttatttgacctcacactgttgattcataccatgtttaaaattgaaatacattacctatatttaaaaattgagacctcacataaaaagctatatttctagctgcttttgaaatttcgaaggatcttccaacacttggctgacattcctgcgtgacaaaaatcagctggagctgtgtaatgtccgacctgtctctgtcaatgaacagattattcattgtcatttctcatctgtttttgagattgtaactttgattctgtataactcatagaattagtagttagacctatatatgttagttattacattatttgtatatgtacagactgctttagacaatattgtagtgttatatgttaattttatcaattaaaatgtgctataggatcattgtagagatcttgtctctaattaacaggattcataaagagaaaacaaaggagagaaacatccagattgaaaagacctacatagtgccaagcacaataaaagaaaccctatactaggcaaattattatgaaatttgttttaggacaccagaaataaagataatatctaaaaactttttagaatcgcctaggagggattaggaatatgaatagcatctaacttgttggcagtagaattgaaggtagaaggtggtaaaacatcaccttgaaagttctgcattcagcctagaattctgtatccagttaaaccatcaatcaagtgtgaaagtagggggaaaaactcaaggactaaaaaaatgtgctcatgaagaacattttttttggacattacccagaagatgtggttcaacaaaacaagggaataaaccaagaaaggaaataaaagagcttcagtaaacagagaatcccactcagaagcaacaaagaagaaagtcccaggatgacagctgtgacacaagctgaaaagttaccagttttgcttggagcaggagattagaacttccgggaaaataatcaaattgatagatggatgttgaaatatttggagaaaaatgtaatggattcttgcaaaactgagcaaattagaaaaaggaaacaattattagcattggtggtttgagttaacccaaaattgtgatgttgctattttaggggaattaagataagtgaaacacgtatggaatactgctagttttgtaagtctcctttaccatggcaggacatctgtagttaataaatctgtaagaagcagtattaagaataatattttaaaatacctaattaaataggaggaaaaagaatccgagtagttgagggtgattgcatctggggagaagcaggaataaaggtttgaagataaatagggccagagatgagtaattttgttactgtgataatatattttatatatatgtgtatgtgtgtgcgtgtgtatatatatatatgagatatatctcatatatatgagatatatatgatatatatatgatatatatgatatatatatataaaacatacagttcagtagcattaacatctagcattcagtacatttacattgttgtgcaattgtcaccactgtccatctctagaactttttcattatcccacactgacataccacacccattaaataataactcctcattgctcctcctgttagtaccaaccattgttctactttcatctctatgtatttgactattctaggtacctcgtataagcggaatcacgtgatatctttttgtaactggcttatttcactaactatcttcgaggttcatccatgttgtagcagttgttagcatttccttccttttaaaaggccgaataatattccattgttatgtatataccatattttgtttatccatttattcatcaatagacacttttggctgttgtgaataatgctgctatgaatatgggtatgtaatacctgtttgagtatctgctttcatttcttttggatatgtacccaaaagtgagattgctggattgaatggtaattctatatttaaatttttgagaaaccaccatactgtttgatatactggctgcccaattttacattaccaccagcaatacactagggttccgaatttgccacatcctcaccatcgtgttgttttgtttatgtttttttttaataatagccatcctaatgggtgtgaagtctcattgtggttttaatttgcattttcctaatgatcagcgatattgaacatttgcacatgcttatttggtcatttgtatatcagctttggagcaatgatgtctcttgaagccttttgcccatttatgaattgagtagtttgggatttttaaattgtgttttagaagttctttgtatactctggctgggcacggtggctcgtgcctttgggaggccgaggcaggtggatcacgaggttaggagttcaagaccagactggctggtatagtgaaaccccatctctactaaaaatacaaaaattagctggtgtggtcgggcgtgatggtgcacacctgtagtcccagctgttggggaggctgaggcaggagacttgcttgaacccggaaggtgggggggttgcagtgagctgagattgtgccactgcactcagcctgggtgacagagcgagactctgtctcaaaaaaaaagaaaaagaagttctttgtattctctgaatattaatcccttattggatatgttatttgcaaatattttctcccataaagaatgggttactttttcactctgttgattgtttcctttgctgtgcaggagctatttagcttgaaaaaatccaacttgtctgttttcttttgttgcctgtacctttggtgtcacattcaagaaataattgccaaattcataccatgaaactttcccccatgttttctcctgaaggtttttatagttttagctctcacatttaggtgtttgatccattttgagttaaattttgtatataatgttatgtaagagtccagcttcacacttttggatgtgaatatctagttttcccagcattatttgttgaaaagagtgtctttttccccattgaatagtcttggcactcttgttgaaaattatttgacaatagatgcaagggtttatttttgggctctctcgactattctgttagactatatgtttgtttttttatgtcaggaccaccctaattttagtactgtagctttatagtaaaatttgaaaccaggaagtatatgtcttgtgtatttatttacttattttttgaaatagcatctggctctgttgcccaggctggagtgcagtggcacaatcttagctcactgcaacctccacatctgaggttcaagcaatcctcccacctcagcctcctgagtagctgggattgtagacacataccaccatgctcagctagtttttgtatttcttgtagagacagggttttgccatattgcccaggtgggtctcgaactcctgagcccaagcagtctgccctcctcagtgtcccaaagtgttgcgattacaggtatgagccaccgtgcatggccccaacttcttatatttcaagatggttttggcccttcagggccctttgtgagttttaggatggattttttttttaacttttaagtttaggggtgcatgtgcaggtttattacataggtaaatttgtgtcaaggtgttctgttgtatagattatttcatcacccaggtattaagcctagtacccattagttatttttcctgagctcgcctcctcccacctggatttttttttttatttctaccagaaacattgttgggattttggtagggattgtattagtctgtagattgcattgaatagtactgacatcttaacaatattaagtctttaaagccatgaacaccagatgtctttccatttatttacgtattctttcttttctttcagcaatgttttgtaattttcagtgtacaagtattttacctccttggttaagttaattcctaagtattttattcattctgatgatcttataaatctgttttcttaatttcctttcctaattgttcattcttagggtatagaaacacaactgattcttcgcacattaaatttgtgccctgcttcttcgcgggtttgtttattctttttttgtgtttgaaatccttgaggttttctgcatataagattatatcatctgcaaatgagataattttacttgttcctttccaatttgagatgatttttattcattttcttaatgctctctcatacattcaatactatgttgaatggaagtggtgaaagcaggcatcctgtcttgtttctgaccttataggaaaagctttcaattctttgccattgactatcatgttagctatgggattttttttttccccccagatagagtctcgctgtgtcgcccaggctggagtgcagtggtgcgatctcggttcactgcaccctcctcctcccgccaggttcaagtgattctcctgcttcagcctcccaagtagctgggattacaggtgtccaccactatgcccagctaattttcgtatttttagtagaaacatggtttcaccatgttggccaagctggtctcgaactcttggcctcaagtgattcacctgcctcggcctcccatagtgctgggattatagtcagccaccatgcctggccactgtgggatttttatatatggccttcattatgttgtggtaatttctttttattcttagtttattgagtgtttttatcataaaatcttgttgaattttttcaaatattttttctgtgctagttgagatgaccatgtgatttgttttcttctttctattaacatgatatattgtttttcatatattgagccatttttgcatcccaggaataaattttacttggtcttcgtgtataatccatttaataagctgtggaattcagtttgttggttctgtgttgaggactttatatcaatgttcctaagggctactggtctatagttttcttttgtagtttctttgactttgctatcagggcaatgctggcctcattgaatgtgttaggaagtgtttcctcatccatttttggcaaaactttgggaaaaaacgatgttctttaaatgtttgatagaattcacagataaaaaaatcacatctagggcttttgtctggaatttttttattgttattattgattcagtcttgttactagttataggtctattcagattttctttttgtgtgtgtgattcagtattagtacattttgtacttctcgttatttctccatttaatctatattatctaatttgttggcatacaattgttcatagtactgtcttctcttttttttaaacttctgtgcagttgatactaatgtccctacttttatttcagattttagtaatttgaatcttctttatcttaatacaggtaaagctgggtcaattgttaaaattttttcaaagaaccagtttttggtttcattgatttttctctgttatttttctattatttatatcctctctaagctttgttatttccttcatcctgctagctttgggtttattagtttgttctttttctagttccttaagatttgaagttggattattgatttgagatcgttttcaattaaatgtgtacaactacaaatttccctcttaggactgcttttgctgttctgtaatttttggcatgttgtgtttttttgttttaatttatttctaagtattttctaagttcccttgtgatttcttctgcgtttaaccgtgtattttttaatttccacagttggtgaattttctactttttcttcagttattgattttattgattttcagtggcatcctgttgtgatagaagatactttatttggttccctgttttttttttaaaacagagtgttgctctgtcacccaggctggagtgcagtggtgcgatcttggctcactgcaacatccacctcctgggttcgagcaattctcctggtctcagcctccccagtaggtaggattacaggcacatgccaccatgcccagctaatttttgtatttttagtagagacagggtttcgccatgttggccaggatgatctcgaactcctgacttcaagtgatccacccgccttggcctcccgaagtgctaggattataggcgttagccaccttgtctggcccagatcctctattttcttgcctatattctgactgggtgtttttgtccattattgagagtagggtatcgaagtgtccagctgttatttcagaactgtctgtttaccttcaattctgtcaattttttgcttcatataattgggtggtctcttattaggcatgtaaatgtttttgattattatatcttcttgctatattgacacttattgatgtgtaatatcttttttgtctcaaccttgttttgatttagtttgtctaatattaatgtagctacctgcactctcatttggttattacttgtatagaatgtctttttacatcccttatttgtgtctttggatctgaaatgagtctcttgtagacagcatatacaatctcttgtagattgtgtttttcttatacattctgtcaaactctgccttttgattgaagagttttatcatttacaattaaagtaattattgataaggatttaactgctgccattttgctgtttattttctatatgccttacagcttttttgtccctcatttcctgccttactggcacttgtgtttagttgatattttgtggtgaagtgttttaatttccttgttatttccttttgtttatattctgctattttctgtgtgtgtgtgtgtgtggttgccattgggggtcacatttaatgccctaaagttataacactgcaatttcaatttataccaatttactttcaatagcatacaaaaattcagctcataagattcagtccctgctcccttccagttattgatgtcataaaattacatttttatgtattgtgtgtctaaaagcgtagactaataattgttttttaatgcagtagtgtcttaatttgtggaaaacaaaaagtggagttgtaaaccaatgttacaataatgctagctttggtaattgctcatgtatttatcatttctcagatctttatttcttaatacagcttcaagttactgtctagtctccttttatttcagcctgaaagactcacttcagcgtttcttgcaggacaggtctggtgataatgaactctctcagattttgttaatctggaaatgtcttaatgtcttcatttttaaggacatttttgctggatatagtattctcagttgacaggtatttgtgtttatttgtttgtttcctttcaggattttaaatatatcatcccactgccttctgtccttcaagagttctgatgagaaatctgctgatattgaggatccctttgtatgttacaagttgcttctctcattccatgttcaggattctcttttttcatagtttgattataatctatctcagtttttcctacttggatctctgagtttttcctacttggagttaattgagcttcttgaatatttatattcatgtctcatcaaatttgggaagtttttgattaatatttcttcacataatcttttttgccccttttctctctttttattctgggattcccagagtgtgtatgtgttggtccacttgatgatggtgttccacaggtgtcttaggctcttgtcttcaattttccttcagttttttttttctgttcctcagacacgtggtattttcagctgttctgccttccaagtttactgattcttctgcctgcccaaattggcttttgaattcctctagtaaatttttatttcagtttttgtacttttcagctccagcatttattttttgatttttttatgttttctctttattgatatttcaattttgttttttgacattatccatatcttcctttagctttttgagcacctttcaacatttgttttaaagtctatgtctagtaagtgtctgccatctgatcttctcaggcacagtttctgttaatttatttttttccttttggcctatacttaatgttttgcttggggtagtttttttttttggtatgctttgtgatttttgttgttgttgtcaaaaactggaatttgaatcttaaagagtggtaactttggaaattagatttttctcttttctctaagatgtgctattttgtttggtttttttatttgttgtagagtatttctatgctgggtgtaatcttaagatcttctcggcctgtgtttttccctgggcatgtgtagtgactttctaaattgccctatgtatgcagttcttttgcagtagtatcctccttaaatgtttggctcctaaaaggcaaaataaataaataaataaataaaaattaaaaattaaaaataaatcaaaggggtgaaatagctctggatctttaaatccctggagcaattttttcagccaatggcagttaaataatgatagtctgcctctgtgtcacattttgatcagaagcagcaattagcaatcagaacacagattcctgatatttggagggcaaggtctttgttgccaaccttgactcttacaaactgtgtgcagggtgctctgggaacatgtgcatggttgcctgctttgagagtgggtgatgggtagccgcgacggcacaaagagctgaaattgactcaaactaactgatttaccattcaagtctttccttagaaactgaaaacctgaatagactccagagttccagaatcacagattctgcttacagtcgtctaggtggggagatgggttcctggtacttctgattctgccatctttctttgactaattttttttttttgttcttgagatggagtcttactctgttgcccgcccaggctggagtacagtagcatgacctcggctcactgcaacctctgcctcccgggttcaggcaattctcctgcctcagcttcccaagtagctggaattacaggcgtgcaccaccatgcctggctaattttttgtatttttagtagagacagggtttcaccatgttggccaggctagtctcgaactcctgacctcaggtgatcaacccgcctcagcctcccaaagtgctaggattacaggtgtgagccactgcacccagctcttagacaaattttttattccaaactttttttattttatcatttgaaaggtatatgtttattattttgtcaaaaataattttaaaacgtattcttgaagcttatttagatctgtttcataggaactgtgaagaaagtaaagaatttaaaaaatgaagacagattttctcaccctgcttatgggtgcttctcgtgctagccttttgcaagtgtcgggaagtgtaacctgcaggaggcatcagggctttgggcctgcatggtctgagtgctgccctgtgagtttcagaaggcgcagcaacctgtatacctgaaagccatctctgctggggcaggtacctagtgtccccacctacctgggtcgtagtcaggccctgggcaagcctgctatgcttttccttccctaatccctcaggggtgggatagagagcacagtggcctcccagggaggtagaagctgctccagactaacaatcagagctgccagttcttaatccccaagaccgccagacttcacaaagacataccgaggtctgtgctgtcagtgccccactactacactcccttaagtagccccacattcttgtgcttgtttcttttttctgctctctttccttgcccaggtaagaggtctgcccataagggatattttgcagcatgtgaagctttttaaaaagttaggcttattgaagtataatttacacacaaagtacaaaaaaaaaaagactgtgttctcaaatctgtgagtcattaatgggtttagatgtttatatattgaaattattggaagtaaggtatgtttatattagaaagatttgtagtctagattatccaagttttgggagtattacctctctgcttttgtttatctacttttttagtctctactttccaagtatctataggcaaattttcccatttccctttggaaagtgctgttttcttgctttttttccgcctttccattgtgtcagacttataaggcaatcagccaactgtgggcatgaaatccttgggaggaaagagaaggaagtgggaggggcagccatggtgaatgtttccctaagttatagtcaagttctttgagagaacataacctcatcccctttttaaactgttgtaatactttcttttaaatagattgtttattctcctgcaagtctcacagttgttcacagtggtaggtaagaaatcataaagttcaaatattaaagggagctcacaaaagagcatggtttcaccagccctcactaaaaacaaaattatgggaaaatgctgtaaaagaaaccagaattcttggttgcaaatgatagaaagtgactctgatttacctaatcagaaaggaatttttaaaaaagtattaggtaggtcatagtttgacaacaagacttggaagataggtggaagctaagggaagcaagacatggccccaaggtttcaacaggagcaatctgcttaggactttgctgcttggacacttggtgtaatagctgctgccactatgcctcgaaactggtgactctgctcattaactcacctcctctggtgatctctaggaataatctctgactctcctgtaccttgtcctcactaggattcggtatccacggcaaaaagatctattaatagttggtatcaggcctgtacatgtgttaagagaaagatgaggaaagaagtatctgcttctaatctcttgaaattatctccaaattgaaatggtattttggttgcctaacagcctgaagatgacaaatatcccctacaaatttctcctattttaccctcttcctaactatatctgtaatttaaagtttcacatattcttttgaaaattgttttcattgtttacccactttttaagaaaagcaaatgggaacatactaccactgtttggcccctttcaaaaattttatatctgaggaatcttccatattgttgtggacatctacctacctgattcttttattaactaccttttatttcattttatgatcatgctatcattaataggcccctatgatgaatatataagttgtttccagttttttttttgtcattgagaacagttcacatatgtatcttgttgtcttttccaagtatatctttaaggcaaattcttagcagtggagttgctaggtccattgcgtctatggtttaaactagtgccttcaaaaatggtattttatatactcactgtttaagagtgcttcttccttctatccccactaactttggcaaactgaatagtttcaaactttaactttttatagcttgttggcaaaaaatggtatcttgttatttgatcgtgtttttttaattgtgaggtttagcgactttttgatgtattggtcttatgtactttctggtgtgtgtgtatgtatatactgaccctattttcaacttatttttcttttagtttgtttgtattttccttaatgattttcaggaaaccaattttattctttcttcagacagttgtctaatgttctgcttctcttgccatttgaattttgtgactacaaaattcagatgaaacaataatagcataaagaacttggtgggttatcttttgttttgcattattgattgtttattaagaaatattctttaaaagtcaccttgcttaaattagcaagtaggaaatgctttcaataaagagaactgtcatgtacccactactccttacttactgaatcatcttcttttggatagagaagataaaagtgaaaagggaatttaagagttcctgcctttttccttgtctttagcattatatagctgtttaatgtgtgggagtctaatttcttttttctttcttgagacaaagtctcactctgttgcccaggctggagtgcagtggcacagtcttggctcactgcaacctctgcctcccaggttcaagcaattctcctgccttagcctcctgagtagctgggactacaggcatgtgccaccatgcccggctaatttttgtatttttagtagatatgggacttcaccatgttggccaggctggtcttgaactcctgacctctagtgatctgcctgctttggcctcccaaagtgctgggattacaggcatgagccactgcacctggcctaatttttttattgttctttttggtgtgaacattctcccctcctccaagccttttgtttttactattttcatgttcctttatatgtgctgctgttttgtttcatctgtaattatctctcatccccttttttggctattataatatatatatgtacgttttgaatctgagctttgaaggtaaattcactgcagctgtgttggttgattttagataatttgtgtatttcctcctttgtcttttttaaactggagtcatttgtagttgtttatacagaattttagtttttaaaaccacaagtctttcattataggttgagttatgaattcatagcctgttatttaaatgaagcttttgaaatctgttttactgatctgtatcatatctaactacgccagtatttccttccttgtctgacgtgaactctaaaattatgtgaacactttctccctgtttcctggcatttccactcaaacttgttcctcattcttagttagaaatatatccagaattgtagtttctttctaatctaatgacagaagcaaattaatcaagcatggcaagaatttattggaaaactgcatgtagttgaaaatatgtttagtatatattttgacagctgtgaagtctctaatttttactgtaccttttctctgttccaattttatgctctattctaaggatgtacccatttctactacctgactagggagcatgtgtattgtatcccagcagattttttttttcatagatagatatcctttagatatctgttatccagtgtaggtagccactagccacatgtagctatcattatgtttaaatgtaaataaaataaaataaatttactgagttgtttttgctagctacatttcttgtgctcagtagctacatgtggcttgtgattactgtattaagacagcacagatacagaacattttcattattgcaaaagttctgttagacagtgctgttctatacagtgtcattctgcctctcattctaaaaagttctaattcctgaagttgatgtactctttctgttgctgtcctctagcttaatcaaaataaatttgagtctttttaaaggtaggttgcattttacatactgatatttctaaatcagaggctatttatattactttttttatattacttttaaaaattagctttattggagtataatttacatgcaataaaatctacccattttaaatgtacggttcattgacttttgagaaatacacacacacacacacacacacacacaccttcttgtaaacacacaccttcttgtaaacacaacaaccaagatttagaacactcgctttatgaaaagtttccctcatgcccatttgtagtcagtccccaaacctggtttcaggcaatctctgatctgctttctatatgctttgcctatactaggattacatataaatacagtcatatagcatgtattcctttttgtgtctggcttctttcttttagtataatatttttgaaatttatccctgttgttactagtatcaataatttgttcttttttattgctgactaatattacattgtatggatatgacatttctttattagtgtggtgggcatttgagttgttttcagtttgggtctgttatgaacaaagctgctgtaagcattcatgtgcaagacttttgtggacatatatttttgtttctgtttattcaatacctttgagtagaattgttgggtcacatgatgtagatcagttgaacagagtagattccagaaaagttcacatacacatttcttgacaaaggtgctgagattattcatgggaaaaggataatcttttaaacaaataatactggaacaatagagaaaacaaagtgaaccttgacttttatgtcttatcatatacaaaaattaatttgaagtggattgttgacctaaatgtaaaagtaaaatttaaaaatataaaacttctagatgaaaacataggagaaaatctctgtgacttttggtttaaagatttcttagacagtacatataaaattaactatataaggaaaaaatggacaaatttgactttatcaacattaaaaatttctgctcattgaaagactcaaaatgaaaaggcaagcagttttggagaaaatatttgcaatacatatatctgaaaaaggacttgaatgtataatatatacataaagatgctcttacaacttcataatgagaaaataaccccataaagagaagggcaggccgggtgcagtggctcatgcctataatgccagcacttttggaggctgaggtgggtgaattgcttgagcccaggagtttgagaccagcctgggcaacatggtgaaacccagtctctacaaaataaaaaaatacaagaaattagctgggcatgatggcatgcacctgtagtcctagctgtttgggaggctgaggtgggaggatagcttgagcctgggaggcggaggctgcagtgagctgtgatcgcaccgctgcacgcttgcctgagcaacacagtgagatcctgtctcaaaacaaacaaacaaaaaaaaaaacaaaaaatggaaacagaaattttacaaaagaagatatatagatggccagtaggcatatgaaaagatgtttaaaatcagtcatcagggaaatgaaaatttaaacgtaatgagatagctcatatttactggaatggctcaaaaagggcttacaggaattggcaaagacatagattaactggaactcttatgcatgttggttagagcacaaaatgatatgatttcttgggagaaatatttggcagtttttaagattatttttgatagccttctgaatttcttagtgagttataggtcagttctgccactgtttctttcttttctttctttctttctttccttccttcccttccttcccttccttgcctgtcttgcctgccttccttgccttgcctgccttgccttcctttcttcctttcttccctttcttttctttcttttctttttttttttaaaggagtctcgttttgttgcccaggctggagtgcagtggcacgatcttggctcactgcaacctccacctcccgggttcaagcaattctccctgcctcagcttccccaatagctgggattacaggcgcgttccaccatacttggctaatttttttaattttggcagaggcagggtttcactgtgttggccaggctagtctcgaacacctgacctcaagtgatctgcccgccttggcctcccagagtactgggattacaggtgtgagccactgcgcctggcctggcactgtttatttcttttccctccagttttatacctatttagagagattagattttcttgagtactaggaatcactatttttgagcagaattattcaaaactgttattattttttctttaacttgaggcaatgtaggagaaagcagtactgtgcaggtgaaagttacaaacaagaacattttaaacaagatagttactttccatgtattggatacgtaacagaattaattctaataaccatcctgaagatggtcaggaggcattagttaagaattgaaatgtttggagcttgcctgtgttgatgggattaaggcagggatgatttatgtgtaaatttatgcgttagtaacagcagtaaccgctgtagttacactagggttctaagagcaaatgttgattaaacatgaatgtagcaggagtgataaggtttggctctgtgtccccacccaaatctcatgtggagttgtgatcctcagtgttggaggaggggcttggtaggaggtgattggatcatgggagtggtttgtaatggttttagcactatcaccctagagctgtctcgcgaaagagttctcctgagatctgcttgtatataagtgtgtagcacctcccctctttgctctctctcttcctcctactcctgccgcggggacgtgcttgctttcccttggccttctgccatgattgtaagtttcctgaggcctctgattaaacctttcttcttctaaaagattacccagtctcaggtagttctttatagcagtgtgagaatggactaatacaaggggaaatatatatggttaccaaatagcgaattagccatgggaaaaagtagcaaataaataattattttactttttcagatgctaatttttcttttcgtttattttaggattggtgggagctgtccaatgtccttaggctgttttccaaatgagataccaaaagctagttctccatcgggtttctcaggctgctagaagcattcattattatggttgtcattacttcgagttctgttgccgctatgcccacagtagtatttgttacataacaggtgcttgataaatatttgctaaatgaatttttggaaaatacaatctgccacacctttcttctacagtttacaatcttctgttgagatcatccgatagattttttttcttagatattgtacttttgaggcctcaaattgctgtcttttgtattttctatgtctgcagagactttccatctttcactcattgtattcattgttttttaacatctttgtacatatttatagtaactgttttaaagtcactgtctgttaattcaaacatctggttcatcttggagtctgattctattgcctgctcttttttctttgtaataggtcatgtttttctgctttgcctgtctagtaaattttaatcgtatgttgaaatgtagggagtttggattgttacttcctttaagggtgctgagtttcattttgtcaggcatttaaattgatagttgatttagtattgtcaggtttggttctctttgttaaagcaggcatttttcagatttgtcttttgtcctagggcatggtttttaacttcaaggttgccctttccaatgtctcagctaagtatctggggtgttccatgaggtctcttccactttgcctaggccagaactccagcttctcccagtattatatttcgttacctctggcgtcatctccgttatgctttcagatcctgcgcatagacagcccagcccccagccaaggacctgagatgaaatccatacaaaattcttagtcccttgctccacaaactccaacagccttagcagtctaatctcttcctgtttacctcagtgaaatctgtgttccacttgagttccatttccttctgtatcagagaagagccaccatgctgaaagcaaggggcactatgtttctttgttcttaaggatggtagcctatctgcaacaactgtagtgtgatataaaaatatataatttatgttgctgacagttacaaatactgcttgcagtactttgtaacataatttttcagattcaagttcatatactctttttttccacatcaccacacacatattttcagacttcctcctcatccttcttcttgccagtagttgtattataattcctgccagtagttacattataattttggttatatcaatattgagtttttatgggattataactagataaatgccattcatagttaagtgatagagtatattgtgacttttttcctgcatgttttattttttctggacttcacagttgtctctcttttttttaaaaaaattagttttcaatgttcttagctttaattcataaactcacccctaattgtataaatctctcaacatgtttaagcacatttggcattatatcaattttatcttttccaggtgccttctaatctgtcccagtctggactaattgttcttcctggcttgctgtatggctgtctactcaagatgtcccttcaccatcattctagggattcccttttcctctcttgtgggttagattcttcagttcttggagactgtcatcttctttcatggtttcccactcttgttttggcggagcacatctttagtaacttcctgacaaagtgtatggtttgagatttcgctgattttaaaatgcccttattatatagtcacacttgatttatagtctgtcttggtatagaattctaggctgagaagagttttccctcaaaatcagaaggttttgcccaattgttttttagctgctagtattgctgttaaaaaggataatgtcattttgattctagattcttttatgaaacctgtttcttctctggcagcttttaggatcttctgtttctttggtattcagaaatttcatgagatatgtgtgcttctattttggtcttattttcatctgttttgccaggtactcatgcaactttccagtttgaaaactcacatccttcacttttgagtatttttcttgagttatgtcttcggtttcttctcagtgttctctgtttctggaactcctaaaatatatttaacatcctgaactcttagtttttgtttagtcttctgattttcatttgtctttttattctgtatattctgttaattcctcggcttcatggtcttctagcccttcttttgcctatcttatggggttgaggattaaacagtttatatacctgaggtgcttaggatatgtctgtcatatagtaagtgcttgtgttagctgtaattgttgtttactttcataactgtcttgagggaaaggtctttggtcttgattctttgacttcttggctgtacatgaccttggacgagttatgtaatctctttgagacctacctccctcttctgtatagtgttaataagctctagctctcagatgtttgtgagggtcgaatggagtatatatgtgaaaatgtttaatacctttgtacagaattaatagttagtacgtggatctttcaaatatcaaaagttttcagtttgatgggaaaatgatgtctgaattttcagggttatttttaagagtacttgattatgactgtcttgtaaatctctatgagctaggtatacttgcactaaatgctaatgctttttaaagaagttatgtcttaatattcagtctcattatgttaggttgaagatagaagattatgaaaatattctctgaaaagctctggttttacttcagattgtataaatctgtgtaatgtaataattatttaagaatgacatgattactactctaaacccatagaaggggtatttgttggattatttattttcacttaaatggtatttgagattaggaaaaagaaaatctgtcttttggtttttcttgatagtattaatgtaatttcaaatgttagctcatttttgttaatggtggctttttgtttgtttgttttgttttaaggtttttggattcaaagcataaaaaccattacaagatatacaatctgtaagtatgttttcttatttgtatgcttgcaaatatcttctaaaacaactattaagtgaaagttatctgcttgttagagtgaggtagagttaaagatacattttaacagaattgtattcctaaaccgattaagtcaagaagtccaagagcattgttagatcatttagaaagtgtagtgatgaggtaaaacattgttggcacagattcatgttacttgatctgctttaaatgacttggcatctagcccatatttgagcccataaccgtgtggtaatttgaagtgtaattcacagtagagcttctgttaaagcactaatagcatcttccatggaggtatacttcagagtgaatataattttgtttatcctgtgtctctagagctattgactgaaaaagctgttagggcattctctaactgtacatcacctaagttatttaaaattgctgaattaggtggcttgtcttgtctaggacagagttttaaggactgcccacctgattgatagagctagttgaccttatctttaactttttgtttttcttttgactttgggagtagagatgtgaaaaggtaaaaaggaaggaaggaagagaaaacttaactctttttgcccatgaagactgtttttccttctcaaaatattgactattttctgatttgtaaaaatcggcacataaaacgtgttattttttacttgacttttatctttcccatgtgatatctataaattatagataggaaaaatttatctgtaatttagtgatctttctagtgtgataaaacgtcagaagtactgagagtggagtggacattgatattgttactctcagtaagttttcactgatttttctcagagtcatgaaggaacaaacgtttgttaagtccttatcacttattagataacacaaaacatgttgggggggtgtgtacagaggtgagtaagatgtagctcccattctcaagtcgcttacattctaatgtaaaaggtagacaaagcattacagaagaagtaactctgctatagaaggttgcaatgaagagaacattggaaacactaattttaccttataaagaaggtttcataaaggaaggcaagtttgagctggggtgaaaaggaccagtaagggttgactttcaagccaaggagaggaggggaagtgatgttacaggccaaaggaatggcattgtaagaagcttgttggcataaaagtgtttagaatatggcagcgaattcattatcatcagattgtggtgtctgtatgttgggggtgggagagaattgtggtggcaataggcaacaagataaaagaaagtaaaaggtgttatggaaacttaatgggtccagcttacaaatgatctatgcatttaggggtctttctcttttcctgataaacctctcctacaaagagccttgttgcggataccatagtgtttctttggaggaaaataaaaactacaaagctttgtattttttgcacaactggattcagaatataagtaataaaaaaggacaagaactttcaaaagctagaagccattaaactgagtcacttcagggttagactatcagaactggggatttagaaagtctcagaatggaaatcgaaggacaccaaagacaaattcggcctttttcaaaattttattctagtttaacatattcaaagaaagggaaggaaattcttttcattcctgtgtgtagtgacttcctgctttaagaacttaggacttcagctgtactatcagtattgtaggccacttaacattattatggttaaagttggcattggagagagcctaggaacctaactgcctgtttgtttttatatttccaaccattggattcccaagttaatgaagtctgtttattagttgagggtagctcttaatgcatatattttaatgccccttccccacatggaatcataagctttcagaactggagagtacctgaaagagatcatttagtccaaccttctcattttacagatggggaatctgaggcctagagaagttaagtgagttgaacaaggtcacacaggtacatatggtagccgaccatccactgtttatgccaatattccctttacgttttgcttttttgcttgttcgttttaacctctccaaattttactgacttcagaagtttctagaactaagttatagcatgttttgagttctaatgtcactttccgatcttctttaccttttttctacctctgtttgtatttctggttctggttaagtgagtctggtaagcagcaggtgttctattttatttcttttatttttaggatagtattacatgtgatatatatgtctttgcaaacatacataatttgaagatcttaaaatatttgcactaggcatacccacatttaatagtatgttaaatcttttatagcaattatgatatacatgggtgaagaagagttcctaatatggcctttctgattaactgtatctgtttatatctgtgttttcttcaggcattcataacattaagcaaattcaggtgtactgttacttaattgaattaatcagtttgttttgtacaagtatattttatttttgttccttgttgtataatctggtaggaatggggaaggggagatagtgaataaagagatgtatacttcttgcctttgaggaatttaagttttcactgtataccaattttttaaaggtatttactatatttcagtgcatattttatttgacatactttatcattttgtggtaaacctttagctttactaattttcatctattaagttttcttttgtaagatggtgatagcttcatcaaagagagtaaagaagagacctgcctacctagctgattctatggcaaatctcacttctctggaagcttttcctgttaatcttattccttcagtttctgcctcttgtttcataaaaactcattctttaaatgcttattcatttctcttgtctcatataaaccaatatgaggtactggtatcttttgagttttagttataaggaagcataaatggttaaatttaaatggctaaaccccatttgccatttgtgtatctttaattttagtttgttgagagacttatcactaccaaaccacaaagaatttaaaagaaactgtcagtaggtataggtggaaggagggcatttatcagagattttaatttaagaagaaagtcttcatccttatcctaccaacccccattccctgagcatatttatcattactagtcccagcatatttgctcccatatttcctatgcttacctgtgaagattttcataactttttccttgctttttactgtcactgttggttctgtgatttatgacagatactgctcttgtaggaatgctggctttgactgaaatttgttactgcttttgtatttaaaactttttttttattataagtagaattatggaacagtagtagaaaaagtttgacttttgtaatcagagatactgagcttgagttctggctctttcatttgtatactgttatttggggcaagttttttaatgctcttaagtcttagctttctcatatataaaatggagataataacagttatcacgtgattgtgaggatgaaacaaaaaaaagtggaaactctttgtaaggtgtgttcatctggttgacacttagtagtcattacttccactttccgtccatatagtcctcttaacagtaatatttgagaggcatttttattaaagcagtcttaaggagtgttcgtcaaaccacatgttctgggatcctgagaaagtaggggaagtttagagaactgaagctgcacaaaactaatgtttattttctgttgtgttgtcctgagaccagcttcttagattgtgtttcctagtcctacatctctgattccttataaaatattccattatgaattcttcactattgacaatttctccccttttatcttaaaagtaccaaagaaagtgtaaaatgtgactgtcttgtcagtcctctttttcctgtttttcatgtcagtgggtatgaaattactagcaaggatgcatatatgtgcatatgtcattactaaatgcattttctttctagaaaaactcaatatactaaattgtactaaaaaggaaaagcttgttttgttttgagtggtagtatgaaagttgttttattttaggtctgaccagttagaaaccaatggattgtagtttatttataattagttaaaccttcatgtgaatttggttttgaattacctttaaggtagagaagaaactatatagatgtttttcagggtttctaaatgtacaatacaggttcacaatcacttatttgaaactcttggggccaagtatgtttccattttcagaaattttagttttcaaaaggtagcacagataaatatacttttacataaacaccccagtggggtgtgggtcagtacctgaaatgaaatgttttactcttcgctctaagtgtattaaatattatgtacaatcttattacttcagatcaggatttgctgtagttgagtttgccataaaacttaagagaaaattttagatgttttgaacttttgggatattgaaattgcaggttaaggagctatggacctttatttgttttaaaatgctaagagtttattttaagtaatttttaaaaaatttgttttgcatagtagttggagttaccagggtactgctaaccacactgatatgtaagatctctttctgagccttttattgtttgtaaacatggcctgttaatcattagaaagccagtacatactaacatatcactgctattaagacaaatattagcatactctagtaatgacaagtcagcattttactattctgtattgattttacttattctttcattactctcatactgtaattaaaacttgcaatctgagagactgttgaaaaaggtgatcgttggcttttcaacagggagtaaggtctggtttaaaaaaaaattagtaagcatttggccaagtagattaacaacattcagtttttctttactgtccttatgcttttactatttttaacatatatctttttgaagaatagtttgagaattatgtatgcttaactatgagatacagatactattgaaactagtcagttgtttataggtacttgtaaaattaaaaatatattccaatagcatgcagatttttcatagaggaaatttgaaagcatggaagcacctgaatttacagtactctgtattagtggcatcacaagtttttaagcaaatgtattagctctaattgcatacacttaatcttttaagctttggttttattattataatatgggggtgataacagtatctacttaatagaattcttgttattacatgaaataattaatgttaaacacagcataatatgtgtcacattataaagattcaggcaatgtttgttagtattagtacttttttttcttcctaagtgcaaaagataactttatatcacttttaaacttttcttttagttgtgctgaaagacattatgacaccgccaaatttaattgcagaggtaggtatgaatgtactgtactatgttgtataacttaaacccgatagactgtatcttactgtcataacaataatgagtcatccagattatcgagtgagatacatatttaagaattatctttaaaaatttcaaaaattttaattttactgttgtgttttaggaaaaagtattgcataaagctattaatattgtcaggaagactaaagtgcagcatagactaagaattaggaaaattcctagactaaaaatagtataaggagagggtttacctactatttgaggcagttggtctaatagtaagcaatcacagggagaaagcagaactacttaactcttctgtgttgaggaatgacataaaaggtaggaaaggatataacaaatgttgataagaggagtctgatggatgagaggagggaactgctttaaatgagtttctacttcagacataagttaattctcagagcccacaaaaactttcacttttatttgtgaaatacaactcagttctcatggcttaacactttaaaccatgagaaaactgaagagttgagaagcttggcagatgctgctgtgatagtcaaaaagaaagtgggtgccatgagctactattgatgtatttgccattgatccctcctgaaaatctagaatggactttcagacaaatggtttgaaaattctaaatcactaatgattgagatttagtataggtttactaagaacgggttttttttgtttttgtttttggtggatttaggctgttgcttactaagcaaagcaggctttagttgaggtttatcttgctttaaacagatatttaacagattttcctggaggtttttgtgtaccactgggaaaatgaagttaggcagatgactaagtgaaagctgtcctgctgactccttataatgatagtcattgtctaccagaagatctctcctgtcacaccaaaggataattgattatatcctgtaccatattatgagtcacctgattggagatataagacatacttctcacatatttagatgacacaggttagtacattgaatatcagccagggtttttaaggatcttaatagagtggaactaaggtagaaactattaagagcaattaatagtgatatatctatagtcctgtttctaaacaagtttttttaaaaacctcaactctgactatagtgaacagagaagtcttggactcttacaattcatgtgagaagacctgaaactttgataacaattatatacattttgtgagtaatttctttggtgtatgccttcacatatctctggtatgtgacctatgctgcagtccattgagcatagattcccagaatgtattctcctgcagaaaatggaggaaaataatacttggcttccctaatgattacatgtgtatacaacactaacatttgcaagaccacctttaaataacacacttagcatttttattttatgaaatgtaatatgtagttctttgcatagtttatcctattagtaatctattctgtctttggaatatgttttgtgatgatgaaataaatactataaatagtattattccttttgcattgagagtcctgacgaaatgtccatgtgacagttcattttgggtttagctctacctctaatatgtgacctatgctaccagtccgtatagcgtaaattcccagaatatatcctcctgaataaaatgggggaaaataatacctggcttccttaatgattatatttaagacttatcaagagactattttctatttaacaattagaaagttaagcaatacattatttttctctggaatccagtgtttcttttaaatacctgttaagtttgtatgcaacatttctaaagttacctacttgttaattaaaaattcaagagtttttttttcttattctgaggttatctttttaccacagttgcacaatatccttttgaagaccataacccaccacagctagaacttatcaaacccttttgtgaagatcttgaccaatggctaagtgaagatgacaatcatgttgcagcaattcactgtaaagctggaaagggacgaactggtgtaatgatatgtgcatatttattacatcggggcaaatttttaaaggcacaagaggccctagatttctatggggaagtaaggaccagagacaaaaaggtaagttattttttgatgtttttcctttcctcttcctggatctgagaatttattggaaaacagattttgggtttctttttttccttcagttttattgaggtgtaattgacaagtaaaaattatatataaatacaatgtataatatgatgttttgatgtatgtgtatatacattgtgaaatgattactacagtcaaactacttaacatattcatcacctcacataattattattctccccccagggtgaaagcatttaagatctacaagctacaattttcaattatacaatgttattattaactatagtcactatgctgtccagtagagcttcagatcttgttcatcttgtgttcctccctccccaccctcagtccctggaaaacaggttttaaagatagttgctaatccttatttcttctaaatttttaaatcagttgctgcctcaatttctatatgagaaatgactgattgatttcatttttctgttcacgctaccattttcatatcatactagcacatgttacccattaactgtattgcagatttggtctcacaaaattcttctaaaataacatttttaaaaagcatattaatcaaaaataagctttatatttctgaagcttgtttgagcatagaatgcctttggataaaataccattacctagtaaagtgtgaacttttataatccataaaaattattcttttataagaatattcataaatgtagttagattaatagaagattctcgattctttgatcagaaaactaaggactatattgaaaaatcagtgacaaatttaattcttatagtacatctgaaagaaaaaagaaaactcttgggagaacttttacagtgatttaattttgctgttgatatatttctttgggtggtaagtatggcaaaacatgttaaaatttaatgcaaagagattttgtacatttttccatctctaagaaggacaaagcctaagcccctccagatagatagaaaaactcatttagagagttctccttcatgttaatctaatttcttcttaattcagctgtaaaacagaaatagaatgatcgtattaatcatttaaagctgtgtaattgcatagattccttgttcctttaccccctcttatatcttgtttcctatcctttgtgactttttttgcattatatataaggatgccgaaatactgtttattgttgatagtttacaaaattgaatcttacattagtgcataattttggtgaatgttgaagattatggtagattgccttacatttctgcatattgtttgcaccttggaatgatagcactggcatgaattatagagctgaggatctaaagatttttactttgatttatcccattatcatctgcagggaaacaattgcttttactgattaaaaatgcaggctgggcacagcggctcacgcctgtaatcccagtactttgggaggccgaggcgggcggatcacaaggtcaagagatcgagaccatcctggccaaccaacatggtgaaacctcatctctactaaaaatacaaaaattagctgggtgtggtggcgcgtgcctgtaatcccagctactcaggatgctgaggcaggagaatcgcttgaacccgggaggtggaggttgcagtgagccgagactgtgccactgcactccagcctggtgatagagggagactccatctcaaaaaaaaaaaaaaatgcagtagcaaaagcgatggtagaaatttaaaacagagttgatgagcagcatatattttggtagtggaaaaaaaggtaaaaaattttttgtaataaaatagaaaaattttgtaatgtggaggcgcagaacactagatttaagccagggggtcttaaattgtgttacattccttttaaagtctgatggaaggtataaatgttctcccctcaaaaaatgtgcatagtgtacataaaattttgcagtttttattacattgaaatatattcttttagacagaatgtaaaagaaccttcatgaaaactatgtcacttttttatgcaaaaaccagtggctactacatgagagcaatgaataaatctaagtggtacaaattaaccaaaattaagctttagttctgttcaatactaaattttaatgaaaagactgctatttaacttttaaaataacaagttgaaactatgctctttgactttgactttgcaacttttatatgatctttgatatccaatcagtgttgactttggtaaaaagtgctgaaaatgctattttacaaaagaaagaagagtaaatggaatctgtagattctattgcctgatgaaagtagacgtgtcaagaaataagaattctccaaggctcttcagataaattcatgtttcatcattttctttgccttcaagttactgagatcatttttggcaagatctgtatcattaatgctgtgttaggaaagaaaagattatgactccacattttactttcaaggttgaagagttaaactgtttaaaaagagtgtatgttatcctgtaaacagcagtatcaggctgtagaatttgtcttctgaaagcagggaacttatatatagcaaagaacttcatagtgctcccatttcttgacaaaacctctcgagaagctcttgattgaaagtcttggctttcatgaatctggcagctttcacaatagtggatttttcatgacaaatcatcttacacagggaattattcaagggttggcacttgaaacagtagaatactttcacaacaagagataagatttctttcaggattgatgacagtcttgcaccctagcgcatactgatgaagagagcagtgggtgaccatgacatggagagcttctgtctttaccagtgccccaatatcagatgtgttgtctggcagtaaggtgtactgtctgcctacagaatactgaggtttcttcaggagaagttttttggtaaagaaactttaccattttgaaagtgttaatgttttctgaagcttccaaaaagattccaaaatgggaatgtttccttgattgtgtcaccatgcttgcatttgatgaaaacttgtagccggctatactgagaaatcatatctgaagaaaggtggtacttccaatctttttgtgacctactttattattgtttttttaatgtcagggttttttttggaatggagaaaagtatttgatagaggtattgcaacagtcttattcttcttcatgctacaagtatatttgactctttctaagatacttgccttcactgttcaactgtgtgactttttgtttgtttagcattacaatcaatatcctagtaggatgatttaatcaatgatttttaattggaacaaatagtttttgtaatggtctaggcttttccaacttaactgtgctctcacatgtggtctctttttctccctctttcctccttcttatacactctcacccacacacatatgcatacataccctgtctgatgtatctgcttcttcagaatagttggctgtgctctgctgatgatgagaacttgccatttaagaaggacttgggatagtccatgtcatcatgttcagggataaaagtaaaacccaagggcatttaaactttattgtattttattttctgtttccagtccaaattaaatccaagagaaggctccataatcaaaaagtaaggacatattttaaatttgccaatgggaagatattctagtcattacagtctggtaatactatcaattctgtttctcttcagaggtgaggggagactatttgatgaaatcgtaagtcctgtagggtgttgtgaaatagggccagaatgaaagatagcaagaatagtgttatgaaaataaaatgcaaagtttataatatcatgtggtaaaatgtaatagtatttacttcatcagtagaactgctctagtagctgtatattctccatccttgcataggttggaatatcccccaagtgaaaagagattgatgggctaatagttaatagaaaatggagatctgtacatacagtgttaagaatgtagatattaaaattgttatatttagctgttacataatattaagactcagagttaagtaatttcactgaaattgattgctttttgtgtcttggagtcaaaataaataactgaaatctactatacttggctcatgcttaattaatatacttagaccatatttcggatgaattattcacagaatctaaaggagtatcctcgtgttcttaccttctttatccctgtgtttatttaaaaaggcaaaaaaaatggagcagatgctgttggttgaccatattttactgaacagtagcatttgtgtttaggttgaaacagcattagaaaactagatacggattaaagtcagtggtaggtttttttttttttttcttccaggaatgtttcttatagatgatcaaacaggcacaggaaggggaagtgttgtgatcaatattatccagttaatattagcattcagaggaaaatttgagtcctctgatacactgttaaatttctttctatactatcaagtccacaaatcctggaactgcaaaagaattttgagactgttcaaaataattaatctctgtataggctcaggctttcctgcaaggttatgaaatgctgataaaattggtcttattttgaaaggctcctcagcttatacctttccttacaaatgcttccttacaaatgctaaagcatttaatgactcctgacttaaagggaatttggacagattgaggttgttggtcttggaaatataatactgcaggcttctgtaaaatacttgaaatgtaattgttttaaaactttcaaagataccacttgtttgcctgttggttagaatactggtgaaataatttttaatcttttatgaataactaatttcatcataagaaaacttagctaagcatggtaaagctgttgttatacaactgtggaattcttcctgaggagtaactatcttataataaatgtagttgattatctaaagtagttttattcttggaatatctcataataggtttattctcttcttgtcagtatttccttgtagattgagcctgtggatttgcatttttgtaattgtgaatcaccattataggagatacatgcattttatctacttttcagtttgtatggggttaactttattagaattatctttaatgttattttgcttatatccttaattttaattatagacaaacattaagaagctggagaaaattatgttctagtgacatttatatagaagaagaatcttttttccccctttcttttttgaagggagatgaggcagtcatattttggtaaagaatttgtagactttgcagaggtctcttcaaaataatctggctcagagtcttgacatatcctcagcagacatggtgcaaattagatggcagagtggtgggtacaagttgaccataaaataacgcattaggttagtaatgcccaaataatactttgggttttcagtgttgcagagaagtcagacaactgatagttattataaagaaaaatgttctgagagtgaggtaaccgcttaagggaaggaagcctccttctgtcttattcactaatttacaagaagataattgtgttacacttccttaggagtcattcatttgtatatttgacacttttgctttatgaacatgtgaagattattcaaaagtaagctgttggtgatttttttcttccaagaaagcatgccacagggcaacttctagggttggttctcatctagtcctgtgctccacactatctgcatctgcacttaagtttcaatattagataactcacatgtttaaactatgaagaaagagttaaaacatcctgagaatgctagtaagtatgtatttttgaaaggacttccaaaatttgagtttaaagaggtaaactccttttacatgacaaagttacttagaaacactactgctgtttccctctcccttgccttctccctgtcccatgcatacccccagctgtgttccagaatgatggcacataaagtaaacattcatatttatttccctttttttgttttttttttttttttttttttttgcttgtttgttttgtttttttgtttgagacagtctcactcaatcacccaggctggagtgcagtggcaacatctcagctcactgcaacctctacctcctgagttcaagcgattctcctgcctcagcctcccgagcagctgggattacaggcgcctgcccccacgcctggctaatttttgtatttttagtagagatggggtttcgccatgttggccagactggtcttgaactcttgacctcaagtgatccgcccacctcggcctcccaaagtgctgagattacaggcatgagtcactgtgcctggcctcttattttttctttggttaaacttttagggaaaaagtttgagctgcttttaattttctttttgtttttaaataaattattaaagtttctctatgttaggaactcttgtgtacatgagttcattgagcttattcttaataaagacaaatcttctagaaataatagttgtatctttaaatgatctcaaggaaaatgtttggtttctctggggaatgaattttcatgacctaatcttaaatcaggttattttttctagcctgtttactaaatttctacatgttataacctaatgaaattttcttacttcctctttatttaaaacaaactataattactgtctttttaaaaatcttccaatgtggcgttcttatttttcttaacatttgaattttcctgggccaaaccatgttactatgatacacattatttaaggctgttatataatacagtaaaattgtagaactttcataccttgaaggatcttagcaattatttaattcaaacccattctaacatagatgataaaacagatttgcagggttgggcacggtggctcatacctatattcccagcactttgggagactcaagcgggaagattgcttgagcccaggagttcaagaccagcttgggcaacatagtgagaggctgtctctacaaaaaaatatttaaaaaatagccgggcatggtgtcacgtgcctgtagttccagctgcttgggaggctgaggtgggaggattgccagagcctgggaggttgaggctgcagtgagccatgatcacaccacagcactctagcctagagcctccctgtgtggcaggctctacacttcagataggcaacagatcgagaccttgtttcacaaaacgaacagatctgcaaagatcaacctgtcctaagtcatataatctctttgtgtaataataaaaaccccatcttctaaccttaaacctggtatttttttctacgaaactatgttctgcagtccaaattatttttctttattattttgaatcctaaagtagaaatagaaacttagaaaaataaaaagcaactcctttatgacatatgaggactttttcagttttaaataagaaaaacccaactcaaagtagcttaaataaaaggagacattttttgacttacataacctaaaagctctggcctggatctaggtgctcaacagatctcaagagtatctctcttattctctctccctcccttaccctcctcctcttttctctcttctgtatatatgttattttcaaacaggctctcacaagtagtggcaagatatagttcctaatagcttcaggtttgcattctacctactttagcaactatgatgagaagagagctacaatttgagcaaaaatttgtagggtgagttctgatttccctggattgaggcacatgcctattattcctgaaccaaatattctgtccagggaatggaattctctggggcatgtatctaaagctgaagtgtagagcctgccacacagggataataatagttttccaaagaaaaatcaaggaggggaaagaatgttggaaagagaaaaaaatatcagttgtctgcttcacatttgttctcaataattagtttcatagaagtgaaatactgtgtaacaccctaaactttagagattcttcgtagacaggaaaaataagaactcaatgaagttgtgacttcattcaaatcacgtagtttatatacatgctattagtaaaacccaggacagctgagtacaagttttacccttatattcacattgaggtccagatcctggttttgaatgagataattacgtgcagtcggactgttttctgatcctaaaaatagagacaataatatctatcttgtaaagttatggtagtgttaaagatatataaaatgttggcaagtaccttaatatacaataactactgctatatgttgtcattgtaataataatcatatttcttcctttgttgaattgctttcctgtagtaatcttattgtgatcatcctgaaacatagatttccgagcttcaagcaaacactattatgttgaaaaatctacattatttctaagtttagcagtgccagtggaaagtttattgaaatagaaaattacttttttaactgaggagtgtagattgtgaattcgtgattcatcttcttaggagatgatcggaatattgataaatattgatgcatagaatatgaacaaaacattacatatcttgtgctgtgatattaaagtagtattctgttctggtagtagtatggcagtattttaggtctgaaagatgtacataatctgtactttgaagtctgttttttaagagattaatcacaagagatttacataaaacaactaaggttaaaaataaatggtggattagagatacatcaggcaaatttcaatttcaaaagcagatgacagaatctcagtatcagggtagcatttaaagcaaaaagcattaaactggatcaaaaatgtcattttacatcaacacagggtacactccaggtaaagacttaacagttatgaacgaatgtgctaaacatcaaaatgtattaagtaaaagctgaaagaaatgaagaataattggtagaaaagcaatgataggaatccttaatgtacttcaaaaggcacgaagtaagaaggtacagtcatgtaccacataatgatgtttgagtcaacacctgacctggtatacgacaatggtcctataaaattataatggagctaaaaagcttctatcacctagtgatgttgaagccgttgcaatgcaatgtatcactcacatgtttgtggtaatgctggtgtaagcaaacttactgtactgtcagttgtataaaagcatagcacagttatgttcagcacataatactttataatgataaacgaatatgttactagtttacgtgtttacagtactattattttagcatgtgcttctgcttattaaaaaatgttaactataaaataatctttaggcagatcctacaggaggtattccagataaaggcattattgtcataggagatggcagctccatggatgttattgccccttaagaccttccagtgggacaagatgtataggtggaagacagtgatattgatgatcctgaccttgtagaggccaaggctaaagtatgtatttattagtttttaacaagagtttaaaaagtaaaaaaaaaaaataaatttaaaaatagaaaaaatcttaataaggatacaaagaaaaaatgtttttgtgtagctgtgtaatatgtttttgttttaagttaaatgttacaaaagagtcagagttaaatttttttatatttataaagtgaaaaagttataaaatgctaaggttaatttactgaagaaagaaaaaatttttaaacagatttagagtagcatgtttataaaatctacagtagtttacagtaatatcctaggccttcacattaactcaccactcacccactgactcacccagagcagcttccaatcctgtaagctccattcgtggtaagtgccctatacaggtgtacaatttttatatcctttataccatttttactgaaccttttctgtcttttagatacacaaataacattgtgttacagttgcctatgatattgaatacagtaacttactgtacaagtttgtagcataggagctgtatcatatagcctgggtgtgtagtgaactataccatctaggcttgtgtaagtatattttatgacacagtgatgaaatcatccagatacagtttctcttaagcaacacataactgtatatatatatatataggtggctttaataataaaataatgaaatatatttctttttttctgtcattgacaaaacaattaccagtcttactaattagatcaactgcaaaacaaaatctcactcaaaaataaaaatatgtaagtcccattccttgattacaattcattagaactggagatttttaaaaatgtttaaatttatatggaaatataaaatcatgttttaaataatttttgattcaatgaggaaatgtaaatttagaactaaagattaataactagagatttataaaggcaaaaatgttaatgaattaggaaacagtaaaccatttgaactaatctaaatactgattgcatgaaaatgccaataaaatcaatacatatttttaaaagccagtcaaggataaaagaaaagagggaaactaaaagtgagacattaagtatgagaaaggagataaaactaaagtgtggaggtgatgttaaaaattatattcaggtctgtgctaatcattttggaaatttcagtgagaagtgggcaattttcagtgaatatatcattgtaaatgctttgaggagagacaaaatctgaatagaccctgcaataatgaaaatgtctaggagccctcaagaaatacctggtttaaattgcatttcaggtggctggttatcacaccttgaagtatcaagtaattatgttatctaaattggaccaggtgttagaaaaatatgtgagacttcacaggtggctgcttatgtagcccttataccttaatctgataaaggtagcatatatttaaaaagagagaaaaccagaaggtacaatttagggaaaattaaatacttctatttggccaaagtaagagtacattcaagggaattgtgagaggtaagagtggaaacagaggttggagctgtatttttatgctgtgattgaattacagtgtgtgataaatattgctcttatttgggtagattaccatttaacattttgaattaattggtaattggattaatcttaacttttaaaaaactaatctgagagtggtataaaggatagattacagaatggataaagggtgataaatcagttggctatggcaaaattgcaggaagaaactgaaataggccacagaaaactgaaactgacattttgagtagtatttcagaatcaagatctggattttggcaactgaatagatgcgtaggaatcaaagatgagtatactaaatgaacttaatctatgatttgtctgtcattttattgtgtaccattagtgtgtatgcatgtatgtatgtgccaggtagttaataggctgactgtgtctcttagctccactctgctgcctgggcctttgccatagtgctggagttccctcacttctcttttctgtaaccctattatattactgctgtctctcagctgtgtttcattcctcaagcagaaagaagatgggaggatcatatagtagttgactagaagctgtggagtttgagtgctgggattatatctagttccattacttatgaagattatatctagttccattacttcacctcatctataaaatggtttaccaatagtacctaccttacatggttttatgagtattaaattatgtatttctaaagacatttagaacaatacaaagaatatagtgtgggctcaataagtgacgatggtgttagttattagaaggccatcgagtgctggagaaaataattgaatatcattgatggaaataaaggaagttttccacgttaaaaagcttcggtttttggaaatgtgtgttttcagtatttctgagattaccaggtagaaattccagccagatgttggaattctgcactggcagttgggaataaagtcatgttaaaggagataagttttggagttattgtgtaaaattggtaaagcactggaatagattggtttgacagaggggaaactctttttgagataggcctatatttagggacaagagaagagacaaccaataagggttgaaagaaaccttgagagagtaagtcctatgacagaagcagggaagtttcagaatgattgcagaaagatcagccaggctcttcctgttctccatcgtggtgcaggatcaaggtgaaaaggataaccccatgcaggaattttgcatctgcaggctccgcttcaacatctgtttaggagaaagtggagacagactgacctgagtaactaaggtcttggaacagcttacaggtcagaaccaggtgttttccaaagctagatatactgttagcgcctttggcaacagaagaaatgaaaagactgttgtctgctgcacagttcgaggggccaaggcagacgaaatcctggagaatgatctaaaggtgcaggagtgtgagttaagaaaaaataacttctcagatactggaaactttggttttgggacccaggaacacattgatctgggtatcagatatgacccaagcattgatgtctacagcctggacttctatgtggtgctggaaaagccaggtttcatcattgcaggtaagaagtgcgggacaggcttcattggtgccaaatagaatcagcaaagaggaggccatgcgctggttccagcagaagtatgatgggatcatccttcctggcaaataaattctcatttctacccaaaagggtaataaaaagttttcagtgaaatgtttaaaaaaaaaataaaaaaaagatcagccagcagccaggatgggattgtgaaaacagcaggaaattagttgttgacaaagcattaatgaccattaagaaatcagcctcggctgggcatggtggctcatccctgtaatcgtaacactttgggaggccaaggcagatttcttgagtccaggagttgagaccagcctaggcaacatggcaaaaccctcgttcctccttaataaataaataaatgaataaataaacaagcaagcaagcagggcttggtgttaggcgcctgtactcctagctactcgggaggctgagggggttgaacctgggaggcaaaggttgcagtgagccaagattgcactactgcactccagcctgggtgacagagtgagaccatggcacccccctccccttcaaaaagaaatcagcctcataatcaatttctctggattaaggagtaagagcgtctcaagatttgctgtttatagagagggaggctaatagtttgagagagatacagaatctagggagagtgtgggtttttggtctttcagttgtttgccagccttggataaagaatgaagattacttgagcatattatttagagacaagtggagagaataaaggcacatgccagataggagataattaataaagcacttgtccaaaatagaaacttgttgaacaggaagagacgtcaagtataaggagattttaagatgggagaagggaattttgagtgtttgtattggatgacctcagggttcccagtaaagcaggagctgaattcatcgaaggtgatgtgttggtcaggatcaagagagaggttgggagaacaaagtgctaaaatcgttgtggtcaagagtttaaaaagtgtataccagaagagttattgagtgataggggtttgaaataggcaaagctgtaggaaagggggctggaaggaatattaggaggaacactaaatatacttctgaggtctacctcctggtctgtgaacataaaggagctgaaagagtaatggctgaagttctttagtttagctaaagttttttagctaaagctagaattgttgaaagttgtatttgaggaaaaaaagttaaggatacagttgaccgttcgataatgtagcccactgttgaccagaagccctacccacaacataaacaggcaataacacatattttgtatgtgtattatatagtatattcttaacaataaagtaaactagagaaaagaacatgtatcaagaaaatcataaggaagagaaaacacatttacagtactgtactgtatttattggtaccatacatttatgttgctgtttacaagatgaagcatctgtctgaaatggccagcagctacagctgtacctatctactgtacatatcaagcaagtcactttattcttataatgtctatgacttctttctttgaaagcgcttccatcatcactgttggcacttcatatgggtctcatggtgttaaggtttacggcattgcactagacacaatgaaaactacacaagagggccgggcacggtggctcacgcctgtaatcccagcactttgggaggccgaggcgggcggatcatgaggtcaggagattgagaccatcctggctaacacagtgaaaccctgtctctattaaaaataaaaaaattagccaggcatggtggcacgtgcctgtaatcccagctaatcgggaggctgaggcaggagaatcgctttttcccagaaggcgtaggttgcagtgagccgagatcgtgccactgcactccagcctggatgatagagggagactctgtcgcaaaaaaaaagaaaagaaaaagaaaagaaaagaaaaacacacaagagccgtgagagagatagcttttgattgcaatacacaatttactggagagatgagctgatcatacagagatgattagtgtcacacagtgttttaaacagattcttgcaaccctggagttcactgcagtagcaacagaagttagctatgagattttaacagtagtatagtatgtactacagttaatattaggtagctatgatttaatgctgcatctttgcatttgtttacatttatcttgactacaagtggtattatgtctggtcttaaggtttgtgtgcatatgttttgatgaattttaactttttataataggtttgtgtatattttatggcagtaaatgataaaacagactaatctacatatattttatgtagtcatgacataaacctaactttttcttaactttttgatatttctagtctatgtgtttcatctgcaggttttttcaaattgttgaaatctctgaaaaattttattgaaaaaaaatccatatatgtaagtggacccacacatttcaaacctgtgttcaagggtcagctgtgtaaataattttcctcaaaattaaagtggaaaaggagagttactactagtagaaagtagaactgtacccttgggcaggggtgtgtgtgtgtagttaaagatcaatttaacttaaaaggtcttggttagagaataaaaactggcccttattagctttaatttacatgaaaaatgaaaaattttaggccaggcacagtggctcaggcctgtaatcccttaactttgggagaccaaggggagtggatcacttgaggtcaggagttcaagacagcctggccaacatgctgactcacccttccctactgaaaatacaaaagttagccaggcgcagtggccatccctacagtgctagctactcgggaggctgaggcaggagaattgcttgaacccgggaggcaaggttgcggtgagctgagatcgcaccactgcactccagactgggtgacagagcgagactccatctcaaaaaaaaaaaaaaaaaaaaaagatttgaaaacagagtattttttaatctgcaagagctttacagccttttattcatatgtataagcttttaaagatgactaaaattttagtgtggactttccactcattggaaatcctatattgcaggtgttaattcaattttagtgagtgtgcatcatggctcagagagataggactagaatgaggaggtcacattggagactctgaaacagatacatgtgagcctcccaactttttaatatttgttaatctagaagtgttgaattttgggtgctgacaaggcagcaggtagataagaattgcaaagttaagaaaatagactgtaatattgatggtaaactaattgattaaattttaaaatgtacttttccatgtttttctttgaattgtcagtaattttgtttcaactggtattcatacatagattattcacccaatgttgacaactagtagatttatatattttttatgttgcctatccttttttgggtaaggattaacagaatgtataatcacctacattataggtacactactaatcacttgctacttgaaaaaacctaaagctttgaaatctttttattattgcacacaaacttatgccaaaaatggagataaagagaaaaatgtcatccactaaaccccaacaaataatgttgacaatgtggtctactcgtagactcgcattgacttaatttttttaaatcttattgcatattttgactagataataaatgcatatggttaaaaaattcacatggttcaaaaaagtacacctcccactcatcttccatgtgatatttcctttctgcttagcaattctgtatttatcttgctaaacatgaatgacagttgtttgctgaaattacattaaatgtgacgtaataaaatcattgtaagtttacattttttaactttaataatttttaatgttttaatgaagagtatgaagagtagtagtactgctcttcaaagtactactactttaccttaccttttactgttttgttaagaaaattaggccgggcgcagtggctcacgcctgtaatcccagcactttgggaggccgagacgggcggatcacgaggtcaggagatcgagaccatcctggctaacacggtgaaaccccgtctctactaaaaatacaaaaattagccgggcatggtggtgcgcgcctgtagtcccagctacacgggaggctgaggcaggagaatggcgtgaacccgggaggcagagcttgcagtgagccgagatcgcaccactgcactccagcctgggcgacagagcgaaactccgtctcaaaaaaaaaaaaaaaaaaaagaaaaaagaaaattatatagaaataaaattccagctattccaaaactgcaccttgaatacaggtacagaattgctaaaaccgtgtaccattttgtagttttagcatgcttttgtgtaactgcatctggtgtttgatcctcatgagagccctgttaaggaagggtacatattattgtcctcattttccttcgaaaacacatcagagtttgtattttgactgtcagcattcaaatacaagtcttttatttataaaattttggtctttatactgtggctaaaaatcttaaatcacttgtcatgatttgaaatggtttataccgattttttttgacatttatacacacatacacatatttttaaattgtctataataaaatcatgctcatctttgaaaaaatattaggagtactacagtggatacctacatacttgctattcagcatacctggttttttgtttgttttttgagacagtcttctctgtggtccaggttggagtgcagtggcacgatctcagctcattgcaacctccgtctcccaggctcaagtgattgtcctgcctcagcctcccaagtagctgggactgcaggtacacatcaccacgcccagctaattttttgtatttttggtagagacggggtttcaccatgttggccaggctggtctccaactcctgacctcaagtgatcagcccacctcggcctcccagagtgctgggattacaggttgtgagccactgcacctggcctgtttttaaattcacataaatatgttttatatttttcattagggagaagaaggttgtgtctacaatttttaagacattggggagatttagatgccagtagtaacttaaaagagaaataattgcaaattctttttcctcttgagtatactttcatttaaggtacagtgttctgtaagttacttttaccgttaaacttcttaatgttgcttattgtttgtcttacatttttaggttggatttttcttaagtcacatgtctaataaaaaaaacccttaaatacctcatttattcgtcttcgttagtgaatgcattgttgtacatattagatttttctctttagataactcagcttcccctattaagtgccacatgtattacaaaattttatttatgttttattgtttaataaactcttgagaactagatacattttaatcatttgtaatacttacattttctaaaacacttcatttttccctggtttcttcaacaaagagatgcatgtagtacaaggatagctttacctgtgttagaagattgtttcacacatttacatcaactgcatagtcctgtttttgttgggccctaatgccagcatcactttttgctactgctgtttctgccttaaaggcaatatgcctctgtctagtttgctgattctgatactctttcccctggaaagtaggtaatcaagtttgtgaggagctgtgtgtttaaggagtccataaatccttgtggggagccctaggtgtatagagcatagctgtagggcagaggcctttgacacttattctggatatgcagtggcctttgcctatggggttcatgggtcagagcgctgttgtgacctttgaataaatgggttgttatgataattgttttaagggaggagagttattctgatatcctttgtattgatattgctcttatttattattgagctggatttaagtattaatcatttaaggtcaaatttctaatgtatatatgttcttaaatggctacgacccagttaccatagcaatttagtgaaataactataatggaacattttttttcaatttggcttctcttttttttctgtccaccagggagtaactattcccagtcagaggcgctatgtgtattattatagctacctgttaaagaatcatctggattatagaccagtggcactgttgtttcacaagatgatgtttgaaactattccaatgttcagtggcggaacttgcagtaagtgcttgaaattctcatccttccatgtattggaacagttttcttaaccatatctagaagtttacataaaaatttagaaagaaatttaccacatttgaaatttatgcaggagactatatttctgaagcatttgaacaaattaattagctttgttgttcaactcattgggctaaagaagccaaaagcaatgggttttaatgtagtcgaagccaaattatatttatgaaagaaatattctgtgttataaccaccaaatacagcccaattctgactagatgatggaagaacctgtcccatcagaggtccagcatgaggtccagcagaggtccaccagaggagttcagcaatttgctgctcttagggcagggatcaattccttaatatcttaggaagactaggtattgacagtaatggtgacaaagcaatgaaaaggaaaggaagaagtgataagacgtggcagcaagctgaagtatgatgagtaaagaataggaatcaaagtatgtggagtgttagagaaaacctggatttagatccagattctagtcctatctctgtcattaatctattgcgtaaccctgagcatatcatctacctctctttgagtttgcttgtcaataaaatgaagagactttgaaatctgagacttcctggataagtactaaatacagattatgtcactgatgtctgcctctatttatttctcccttttaccctaatctctataagtctacctcagtcatcctgatcctattctacttctctgatgttgttgtcagataggtgtgatcatcctcatcagatcttttctgtattcttagagacagataactttatcaaagaccacagatttattagtatagcatgttaaagtcttctaaagagtctcattgatgctcttttcatctcagtacaatttttaaaactgctgaatgcaaggtactgagctgttggaagtgactgacagatgaatgtaacagattcatagagaaggaaaaaggaagaaaaactcatgctcttcctatagtattgatatcagtgtaagagccaagagaaaggtataaagtatcatgcagatattaagggaaagaaaacattcactttagtaatctttcctcattttctagtttcctcttatgtactatgatttaatactgtagtaaagttttaataaaatatgagctatatgtaattaagtgggaggttgtggggctaggcacgaggctcacacgtgtaaccccagcactttgggaggctgaggcaggcggatcgcttgatctcaggagttcgagaccagcctggacaacaaggtgaaaccccatctctactaaaaacacaaaaattagctgggcatagtggcacacacctgtagtcccagcttcttgggaggctgaggcaggagaatcgcttgaatccaggaggcagaggttgcagttagccgagatcatgccactgcactgcagcctggacatcggagcaagactttgtcttagaaataaataaataaatataaaataaaataaatgggaagttgtgtatataaattataaatgctacattcagaaaagcttttgaaggttgtcagacagtttcttaaaggaagttcaccagttctttattgaacattgaagaaaacatacagtttagactggcattaaaactgaaagaagtggccagacgcagtggtagacgcagtggttcacgcctgtaatcccagcactttgggaggtcaaggtggatggatcacctgaggtcaggagtttgagatcaggctggccgacatggtgaaaccctgtctctactaaaaatacaaaaattagccaggcatggtgatgcgtgcctgtagtcccagctacttgggaggctgaggcaggagaattgcttgaagccgaaggtggaggttgcagtgagccgagattgcgtcattgcactccagccagggcggtaagagtgaggctccgtcttaaaaaaaaaataagtaaataaattaaaaactactgaaagaagtattacaggcaatgggaaatagcttgagtggaagtgcagcagaaggaaaaagctggacaagaatgtagtgtcagagaataggtatggaacgtgtgagtgactgttagaggatcttgaatggggataacagacttgatttcataaatactgagatgtcatgataatacttgaggactaaaccatgttttaaggacagttgtatgcaaagttgtaatcgcaagaggaaaaaatagtggaaaagaaaccagtaataaaacttgccttaatgcaggtatgctaagacaatcaaatgggatttcattaattttttatttgccatttatagccaaagattttgtaaaagttttgagcccagtcaggtgaaatagtctcagaaagaaagaaaagtgaatctgagacttggagacattaatgttgatattttggttttaaacgtgttttaaatccggtaaaagtgagcttctcacatgacaatattcagtgggtacttgggagtatgggttcgaatctaggtaggagatatatcgatattttgggcatcatcaggaaagggagagtagttaagcctttcatataaataatggtgtggcgtttgggcatgggaagtcttggaggaaaggaagaaaaggagagggtgaggactgagataagaatggcaacttgggtttaggaagaagaagaggaatcaatgtagagaacagatagtgctgaaaaatacagcatcttctgtagggattggcagctttttcttgatttttgtcttaatatttctaagagatggaaaaagctactatattctagacatttaacagggttaaaaatgttactaaaagatgatcaatgtggttttcattcaagactataacaatatgtatatatccaaggaaatttaattctgacttaaaaaaattgttttgcttgtatagatttagggacacaagtgtaattttgttacatgcatagagtgtatagtttcaagtcagggcttttaggttgtccatcatctgaataatatacattgtacccattaagtaatttctcatcttctactcaccgtttcaagtctccactatttatcattccattctttacattctgattttcatttactaggtgtattagtctgtttttgcattgctttaaagaaatacctgagactgagtattaaacaggtttaacctgttttctttatgaattcttctttaattggctcatggttctgcacgctgtacagaaagcatagcagcatctgcttctggggaggcctcaggaagcctccaatcatggctgaaggcaaaaggggagcatggtgagaatgggagcaagaaagagaaggagtggtggggagaaggtgccacccacttttaaatgccagctcacttaccaccaagaggatggcccaagccattcatgtgggatctgcccccatgattcaagcttcttccaccaggccccacctctagcactggggattacaattcaacctgagatttgggagggaaagatatccaaactatatcactaggtctggatcttgttatttattttttggaacatagtcatatatatccaaggatatatattgtagaagtccacagaaccatactaatattggacttctgcttagttaggtcttatctatctgaaacatgatattcatattgcagagaagattattttctttagtgattgaggaaatctttactacttatacatttttaatataatactataatatttgaagatgcacattttagatgtagtttaattgaaacctggaaatactattaatttgctttttaaagtcctaaaatcaggattatcagattctgaattaatggagtttaaatcaaaaagattacaaggcagtttttcagttttattctggttaattttatcacagctttggaatcctactttgtttatttgcttcttgaagttagatttcccagtgaaatttcagtatcacataaagtcttatgaaatggctcattgcactttgaactttgagtcaaggaagtgaaatttattgatagattgttggtgtaatatttatcctgtttgtggtagcttttttgaataataagtgtcttagaagaccatgttggagtagcctgcatgcttttatcaaacatattaattatgtgatggctgatactgctttagatattacatagaaatagtagtaggtgtttactaaactggaaatttcatttaacttggtttagctttgccttgttctcagtcacattgataaaaatgtaagacttttgtttatcttttagaataatgacaccttttggtgctgagaattttttgttttatatatatatatatatatacgtaatataaatacaaaatatatttaaatatgtataatatttctcatacactttatgtaactttgtgttcctgtttctctattatcttggcatgttttcttcaaatggcacttcttaacctcctaaggttaataaatttctttgtaatggacttttgttttctaattcctcagcgtatgacaaatgaattatactttgtcaaattatttaggtaactttcagtttttgaagtcctgggatcataacattcatcagtctttaatttctgtcattaaggtcattagctataaatgaatttatgagtagatttaaaaaataaaacatacaatccttcccttaacacactttcccaccatttggttcaactgctagtgtaaaagcatgatgaattttgagaagttatattttaccagttactttattttttaccagttatttaaaacagacatgagccaaagccagaatacttgttaatgaaaatgaggtgttttggaggaaaggaaggttgtgctgcagtttttacttgaaatctgttacatttctttacagaaatttcaaatctcttgtttcctgttatgatggtggcattatatacctttaaaatgtgagctataggaaaatgaatgatggttaattttttaataaatatttagacttgtgtttttgaaattttttataacattgttataggttttatcctctttctcttgtgaacatgtagtgatttgtattttgtgatctttgccgcatgctagagacttaagaatactatagcaaatatctgtcttctttacatttaaaaatttttcgtgactactccctgttgatatctgtcttaaaagttacttttgatgtagttcacaaatgtaccagataattatttcatcgtttttaatgcttaaagtttttatttgtattaggatttttagtatgattttaatgttaaagttttgaagttactctgccactagaagtctaattttgggacttactattcatgaaataggaattgacttttatataagtaataggaccttattttgaaggttcaaactggagaaaatcttacattgtttatatttttatttcatttatttcagttgatttgcttgagatcaagattgcagatacagaatccatatttcgtgtatattgctgatattaatcattaaaatcgtttttgacagtttgacagttaaaggcatttcctgtgaaataatactggtatgtatttaaccatgcagatcctcagtttgtggtctgccagctaaaggtgaagatatattcctccaattcaggacccacacgacgggaagacaagttcatgtactttgagttccctcagccgttacctgtgtgtggtgatatcaaagtagagttcttccacaaacagaacaagatgctaaaaaaggtttgtactttactttcattgggagaaatatccaaaataaggacagattaaaagctatattttattttatgacatgtaaggaactataatttgttttctattagatctgcaggtgttttgcttactctggcattggtgagacattataagggtaaataatcctgtttgaaggaaaaggccttatggcattgtaacatgagaggaatttttcttaacaaggatggttaactgagaagaaattagcatgggaccaatattttaaaaattttggtctataggtagaaatgagatctgttctgtggtcttatgtagtgacacaaaccactttttctccattttggcttatgtttctttttctttccttttttttttttttcctttttgttagagacagggtcttgttctattgcccaggctgagtagctaagactacaagcatgtgccaccacacccagctaattttttttatttttatttttgtagggacagggtctcactatgttgcccaggctggtctcaaactcctgggcacaagcagtcctcacgctttggcatcccaaagagttggaattacaggtgtgcgccatcatgcctggccttaacgtttcttaagacttgattattttctatttagcttctgtggatttactgattaattttttaactaggagagaaatcagtatgaagaggaagtaataaagaatgaaaacatggtatttaaatgtgcaggtttagaaagttaatgaagtttgaatttgattgatctgtatttagagaaggcaacgtcttattattttaaaaccaactatccgccctgtgcggtggctcacgcctgtaattccagcactttgggaggctgaggtgggcagatcagctgaggtcaggagttcgagaccagcctggccaacatggttaaaccccatctctactaaaaatacaaaaaaattagccgggtgtggtggcaggcgcctgttttcccagctactcaggaggcttgaggcaggataattgctgaacccgagaggcggaggttgcagtaagccaagaatgcaccattgtactccagcctgggcaacaagagtgaaactccatctcaaaaaaaaagaaaaaaaaaacaacaactatcttcatttaaaatattaaatgtgaatatttaaagtgagactaaggtgcaacatttttagatagtaatgaagaaaaggactaactttgtagtgttgctgccttgttaaacatactagatagcatattgccaatctttaaacattctcaatgataggatttatttactttttctgatttttagcttttcttttgaaagaaaataagaggaagtttcatttactgcaaaattttaaatgctgctttgatgtatcagtagagatataattttcctttatccagaatccaagtagctggaaaaaaaaatcaaaatatgctgaacttttttttttttagccagaaacccatttcctatcgtctgtacaaataaaagttaaatatatctcaataacttagaaaaattattttttgataatccaggaagtattagcaactgttttaaaattaagataactagtaagttttatttagctttcaaaaataggcatctacatcatcatctctgcatacctttaggaatttcctaattcttatttcccttcatctgtactttaacacatgcaaaattgaaggttagattaaatatttatgatttatttgtttatccttgactacataaatttccattttattgattttccctgccttatttaagaatatgctatgattaaaacacaaaaaattttagtataacccatatatatatagaattcacctttttgttatttaaatattattggcttattttcttctaagtaaaatacaattactggctaaaataattgaaataagcaaaaaaaaaattttaaagaccttgtatacaagattactttgccaggtactgttaaaagatgcaatgacatttaagacgtaacatccttaaggatcttattttctgggggataaaaaactttaagataaattagaataaaagatttaaatggcattttaaggtaccaggtaccagataagatgtcacaaggctgtatatcattaattgccaaatgatttatacaggccagatttctttgttggtcaatagaggtttaaagtgatgaacttctgttgtgtttttttattaagaaggtattatcttattagtaagaagtgattttttttaagaacaagcattttataacatcaaaagaaatcagtagtactctttcctaccccctcatatttattctgaaagtattcaagcattatattgtcatgtaagaaactggagcttctcatgtttgtattgctgtagaagtaaacatgtatttgccatgcgtcatcagggaagttgcactcaccgtccaagaacttttgttaaagtaaatcttggaataggtagctcatttgaaatgtagaaaaaattaaatccatatctgaattttgtttatatgtatgtacacgtaaactaaaaacgtatttaaagctagtattagatgagaaaagaggtttttttacttaaaattttaaggcaaaagtagtttatcttagatcttgtgagattgtatttttggtttaaaatttgagaatttgagtgaagaaaaatcatgtgaatgaaaatgcaacagataactcagattgccttataatagtctttgtgtttacctttattcagaatatcaaatgatagtttattttgttgactttttgcaaatgtttaacataggtgacagattttcttttttaaaaaaataaaacatcattaattaaatatgtcatttcatttctttttcttttctttttttttttttttaggacaaaatgtttcacttttgggtaaatacattcttcataccaggaccagaggaaacctcagaaaaagtagaaaatggaagtctatgtgatcaagaaatcgatagcatttgcagtatagagcgtgcagataatgacaaggaatatctagtacttactttaacaaaaaatgatcttgacaaagcaaataaagacaaagccaaccgatacttttctccaaattttaaggtcagttaaattaaacattttgtgggggttgttgacttgtatgtatgtgatgtgtgtttaattctaggagtacagctgatgaagaacttgcttgacaagtttttaacttatgtattatttcgaagcagtgtttacgtagcagtaacatgaaagtttctaataaaatacccaatgtacacagcgtcaaaaaagctgcatttttccttttcctaattcttcgttgtttgctgaaatctggggcaaaggtgcgggagggggctaaatgactgggatatgaagtaggaatgggagaggaaagaaatagatgggaactcagtcatttgggaatgattcatatggaatgtttttactgcttccactcctgtctgccttccaatttattctcaatccctcagagtgatcttaaaaatagacttgattgtgtcacttctgtttacactttataaggaccttgtgtttttttttttaccatgacctacaaggcccagcataatttagcacagggctacctcctacatcagcactagtcaccttctctccttgtttcttgagattcagtcatactggtctttcttcagttcttcaaaatgctaagcttctgcctcttctagtctttccagttattttccttctccctgtaccttttcatctcagccttttcccctgaccttccatagctatcttcatatttccagccttagcttcaatctcatattctctgaagtcctttgattgtcctcccgttattctttttttaaaaatcctatttccttatattgtatcttagaattatttggtttgtttcatttttgcctatgtgtgatatatgtatttctacataggtatatatatctacttatagacaagaattcttcagattaaaaaaatctgatttgtaaacattcccaagtggttgtttaccatttttttcttcccccttcctatttcttattctacctgattttcccctgttcattcaccacactcgtttctttctcttttttactctctcttaatttttcattcaatttttataacatgtaataaatctaactgtagcgtctgagtattaagaatattgctagtaatacttcacctgtaatcccagcactttgggaggctaaggcaggcggatcacttgaggcccaggagtttaagaccagccggccaatatggcgaaaccctatctgcactacaaatacaaaaattagctgggcatggtgtcgcacacctgtaatcccagctacttgggaggctgaggcacaagaattgcttgagcctgtgagatggaggttgcagtgagccgagatcacaccagtgcacgtgcacttcagcctgggcaacagagcaagactctgtcttaaaaaaaaaaaaaaaaaaaaaatatatacacacacacacacacacacacacacacacacacactattactaccaatatacatacatatatgtatgtatgtatgtatgtatattggtagtaatagtaatacttgggcccctgcacgttttaagtgaaaatagatctaatattaaatgtctttagcccttaaattttttttaagtgttcagaagtttccctttaaaaaaatttttaatatataataattgtacatatttatgggatacagagtgatattttcatgtatgcagtgtgtgatgatcaaatcaggataattagcatatggatcacctcaaacatttgtcatttctttgtgttaggaacattcaaaattctgtcttctagctatttgaaaatatacagtaaattattgttgactagttacagttctatagaacactataatttattcctcctgtgtgtaattttttatcttttaaccaacatctccctatcctcccctcccactccctttcccggcctctaataaccacactcttatgagctcaacttttttagcttccatatatgagtgagaacatacggtatttatctttctgtacctgacttattttacttaacatcatgtcctccgggctagacattctctttagaatccacaggtttcctttcttttctctaaatctgcattttgctcagccattaacttttaaaatgtctttttccctttagttttattgttttctattttaatattgcaagatgttttatatttgtgattacaaataaaaactccattattagtaaacaaatacaatgtcatatagtagtaagtgctataaaaaatagacaggatagaaagtaatcttggtttgtatgttttttgttttttagcaaagatgattagagaaggcccaaccaagcagataacatttaagcagaggcctaaatcatataagtgagttatacaaatatctgggaaaagagttaagagtacagatgcaaaagcccttagacaagagaatgagcttggtatatctgaagagtggataagtcattttgactgaaacagagtggacaagaaaaccagtccaagtgtaaagacactagtgtgtgttcagcataggaaggatgtaatctgaattttgtgtttaatattccctgtgttcatgctttcaaaatacagatgagtgaggaaagtagggagaaggggtaataaaggaagctgagagatcagttaagaggtacttgaatagtttagtaaagatgagagaagatgtttgcttcttgttgcccctcactgcttagaatagtggcagtgaagggtaacaagaagctgtcagattaacttaaagagtttactgatgcagtggatgttggttgtaagagaagaattgataatgactcttggataataggggagggaggggctgtcaatataatataatgaagaagggatttgaagtcatttctgatttaaatctcacatccactacctacttttaatagatatgtagcctttaacaagttccctaacctttctgggccttagctacctccccttggaaatggaaatacctaacatgtaaggttgttttgacagttattttcactaggcatgtaaaggcacttgactctctgttatagaccactgtattatgttaatgtccctctccttcctccctttaggtaaagtttttagggctaataaatcccaaatatcaatgttgatcagtagtttgtgtttgtgtagtgttgtttatatcaaaaactacattgaagccgggcacagtggttcacgcctaaaatcgcaacactttgggaggccaaggtgggcctcccaccttgaactaaggagtttgagaccagcctgggcaacatggtgaaatcccatctctacaaaaaatataaaagctagctgggtgtggtggcatgcacctgtagtcctagctacttgggaggctgaggttgatcctgggagtttgagcctgcagtgagctgtgaagatgccactgcactctagtctgggtgacagagcaagaccctgtctcaaaaacacacacacacacacacacacacacaaagaaatacattgatttttcacataggtagtaagagaaacattctttttgaactcagctgtttgtgaattgaattttgtaattcaaatgctatattatgtaaactattgatgactttcaatctgcatttattttgtataattatttagttaatatttgccacttatattccttaaaaaataaaattgaggttgggcgtggtggctcacacttgtaatcccagcactttgggaggctgaggcaggcagattgcctgagctcaggagtttgagatcagcctgggcaacatcatgaaccccatttctactaaaatacaaaaaattatctgggcatggtggtgtacacctgtagccctagctgtttgggaggctaaggcacgagaattgcttgaacccgggaggcagaggttgcagtgagccaagatcatgccactgcactccagcttggcaacagagcaagactcttgtctccagaaataaaaataaataaattgtattaacatcctgatagtttatctgtttagtacctagcaagaaagaaaatgttgaacatcttaagaagagggtcatttaaaaggcctcttaaagatcatgtttgttacagtgcttaaaaattaatatgttcatctgcaaaatggaataaaaaatctgttaaaaatatatttcactaaatagtttaagatgagtcatatttgtgggttttcattttaaattttctttctctaggtgaagctgtacttcacaaaaacagtagaggagccgtcaaatccagaggctagcagttcaacttctgtaacaccagatgttagtgacaatgaacctgatcattatagatattctgacaccactgactctgatccagagaatgaaccttttgatgaagatcagcatacacaaattacaaaagtctgaatttttttttatcaagagggataaaacaccatgaaaataaacttgaataaactgaaaatggacctttttttttttaatggcaataggacattgtgtcagattaccagttataggaacaattctcttttcctgaccaatcttgttttaccctatacatccacagggttttgacacttgttgtccagttgaaaaaaggttgtgtagctgtgtcatgtatatacctttttgtgtcaaaaggacatttaaaattcaattaggattaataaagatggcactttcccgttttattccagttttataaaaagtggagacagactgatgtgtatacgtaggaattttttccttttgtgttctgtcaccaactgaagtggctaaagagctttgtgatatactggttcacatcctacccctttgcacttgtggcaacagataagtttgcagttggctaagagaggtttccgaagggttttgctacattctaatgcatgtattcgggttaggggaatggagggaatgctcagaaaggaaataattttatgctggactctggaccatataccatctccagctatttacacacacctttctttagcatgctacagttattaatctggacattcgaggaattggccgctgtcactgcttgttgtttgcgcatttttttttaaagcatattggtgctagaaaaggcagctaaaggaagtgaatctgtattggggtacaggaatgaaccttctgcaacatcttaagatccacaaatgaagggatataaaaataatgtcataggtaagaaacacagcaacaatgacttaaccatataaatgtggaggctatcaacaaagaatgggcttgaaacattataaaaattgacaatgatttattaaatatgttttctcaattgtaacgacttctccatctcctgtgtaatcaaggccagtgctaaaattcagatgctgttagtacctacatcagtcaacaacttacacttattttactagttttcaatcataatacctgctgtggatgcttcatgtgctgcctgcaagcttcttttttctcattaaatataaaatattttgtaatgctgcacagaaattttcaatttgagattctacagtaagcgttttttttctttgaagatttatgatgcacttattcaatagctgtcagccgttccacccttttgaccttacacattctattacaatgaattttgcagttttgcacattttttaaatgtcattaactgttagggaattttacttgaatactgaatacatataatgtttatattaaaaaggacatttgtgttaaaaaggaaattagagttgcagtaaactttcaatgctgcacacaaaaaaaagacatttgatttttcagtagaaattgtcctacatgtgctttattgatttgctattgaaagaatagggtttttttttttttttttttttttttttttaaatgtgcagtgttgaatcatttcttcatagtgctcccccgagttgggactagggcttcaatttcacttcttaaaaaaaatcatcatatatttgatatgcccagactgcatacgattttaagcggagtacaactactattgtaaagctaatgtgaagatattattaaaaaggtttttttttccagaaatttggtgtcttcaaattataccttcaccttgacatttgaatatccagccattttgtttcttaatggtataaaattccattttcaataacttattggtgctgaaattgttcactagctgtggtctgacctagttaatttacaaatacagattgaataggacctactagagcagcatttatagagtttgatggcaaatagattaggcagaacttcatctaaaatattcttagtaaataatgttgacacgttttccataccttgtcagtttcattcaacaatttttaaatttttaacaaagctcttaggatttacacatttatatttaaacattgatatatagagtattgattgattgctcataagttaaattggtaaagttagagacaactattctaacacctcaccattgaaatttatatgccaccttgtctttcataaaagctgaaaattgttacctaaaatgaaaatcaacttcatgttttgaagatagttataaatattgttctttgttacaatttcgggcaccgcatattaaaacgtaactttattgttccaatatgtaacatggagggccaggtcataaataatgacattataatgggcttttgcactgttattatttttcctttggaatgtgaaggtctgaatgagggttttgattttgaatgtttcaatgtttttgagaagccttgcttacattttatggtgtagtcattggaaatggaaaaatggcattatatatattatatatataaatatatattatacatactctccttactttatttcagttaccatccccatagaatttgacaagaattgctatgactgaaaggttttcgagtcctaattaaaactttatttatggcagtattcataattagcctgaaatgcattctgtaggtaatctctgagtttctggaatattttcttagactttttggatgtgcagcagcttacatgtctgaagttacttgaaggcatcacttttaagaaagcttacagttgggccctgtaccatcccaagtcctttgtagctcctcttgaacatgtttgccatacttttaaaagggtagttgaataaatagcatcaccattctttgctgtggcacaggttataaacttaagtggagtttaccggcagcatcaaatgtttcagctttaaaaaataaaagtagggtacaagtttaatgtttagttctagaaattttgtgcaatatgttcataacgatggctgtggttgccacaaagtgcctcgtttacctttaaatactgttaatgtgtcatgcatgcagatggaaggggtggaactgtgcactaaagtgggggctttaactgtagtatttggcagagttgccttctacctgccagttcaaaagttcaacctgttttcatatagaatatatatactaaaaaatttcagtctgttaaacagccttactctgattcagcctcttcagatactcttgtgctgtgcagcagtggctctgtgtgtaaatgctatgcactgaggatacacaaaaataccaatatgatgtgtacaggataatgcctcatcccaatcagatgtccatttgttattgtgtttgttaacaaccctttatctcttagtgttataaactccacttaaaactgattaaagtctcattcttgtca

1. A method of identifying a genetically abnormal cell in a sputum sample, the method comprising:
(a) staining a sputum sample using a morphological stain so as to identify a lower airway tract cell or lung cell in said sputum sample; and
(b) staining said sputum sample using fluorescent in situ hybridization (FISH) so as to identify in said lower airway tract cell or lung cell a genetic abnormality in at least one of human chromosome 3p22.1 and 10q22-23,
thereby identifying the genetically abnormal cell in the sputum sample.

2. A method of diagnosing lung cancer in a subject comprising:
(a) staining a sputum sample of the subject with a morphological stain so as to identify lower airway tract cells or lung cells in said sputum sample;
(b) staining said sputum sample with FISH so as to identify a genetic abnormality in at least one of human chromosome 3p22.1 and 10q22-23 in said lower airway tract cells or lung cells identified in step (a),
wherein a percentage or number above a predetermined threshold of said lower airway tract cells or lung cells having said genetic abnormality is indicative of the lung cancer,
thereby diagnosing the lung cancer in the subject.

3. A method of diagnosing lung cancer in a subject, comprising:
(a) staining a sputum sample with a morphological stain so as to identify lower airway tract cells or lung cells in said sputum sample;
(b) staining said sputum sample with FISH so as to identify a genetic abnormality in at least one of human chromosome 3p22.1 and 10q22-23 in cells of said sputum sample,
wherein a percentage or number above a predetermined threshold of:
(i) said lower airway tract cells or lung cells of said sputum sample identified in step (a) having said genetic abnormality; or
(ii) said cells of said sputum sample having said genetic abnormality
is indicative of the lung cancer,
thereby diagnosing the lung cancer in the subject.

4. A kit for diagnosing lung cancer, the kit comprising a morphological stain and a FISH probe specific for human chromosome 3p22.1 and/or 10q22-23.

5. The method of claim 3, wherein said cells of said sputum sample comprise lower airway tract cells, lung cells, squamous epithelial cells and/or blood cells.

6. The method of claim 2, further comprising:
(c) imaging said lower airway tract cell or lung cell with at least two imaging modalities, thereby identifying said genetic abnormality in said cell.

7. The method of claim 3, further comprising:
(c) imaging said lower airway tract cells or lung cells with at least two imaging modalities, thereby identifying genetic abnormalities in said lower airway tract cells or lung cells.

8. The method of claim 6, wherein said imaging is effected simultaneously.

9. The method of claim 6, wherein said imaging is effected using an automated image analysis device capable of at least dual imaging.

10. The kit of claim 4, further comprises instructions for use in diagnosing lung cancer.

11. The kit of claim 4, for diagnosing lung cancer in a sputum sample.

12. The method of claim 2, wherein said sputum sample is induced by saline inhalation.

13. The kit of claim 10, wherein said instructions comprise a predetermined threshold of a percentage or number of lower airway tract cell or lung cell having a genetically abnormality in said human chromosome 3p22.1 and/or 10q22-23 which is indicative of positive diagnosis of lung cancer.

14. The method of claim 2, wherein said sputum sample is obtained from a subject at risk of developing lung cancer.

15. The method of claim 2, wherein the subject is at risk of developing lung cancer.

16. The method of claim 2, wherein said lung cancer comprises non-small cell lung cancer.

17. The method of claim 2, wherein said lung cancer comprises metastatic lung cancer.

18. The method of claim 2, wherein said morphological stain is selected from the group consisting of May-Grünwald-Giemsa, Giemsa, Papanicolaou, Diff-Quick, and Hematoxylin-Eosin.

19. The method of claim 1, wherein said FISH is effected using a FISH probe specific to human chromosome 3p22.1 and a FISH probe specific to human chromosome 10q22-23.

20. The method of claim 2, wherein said FISH is effected using at least three FISH probes.

21. The method of claim 2, wherein said FISH is effected using at least four FISH probes.

22. The method of claim 2, wherein said FISH is effected using a FISH probe specific to human chromosome 3p22.1, a FISH probe specific to human chromosome 10q22-23 and a FISH probe specific to human chromosome 10.

23. The method of claim 2, wherein said FISH is effected using a FISH probe specific to human chromosome 3p22.1, a FISH probe specific to human chromosome 10q22-23 and a FISH probe specific to human chromosome 3.

24. The method of claim 2, wherein said FISH is effected using a FISH probe selected from a group of probes specific to human chromosome 3p22.1, human chromosome 10q22-23, human chromosome 3 and human chromosome 10.
